(19) United States
(12) Patent Application Publication
(10) Pub. No.: US 2015/0051268 A1
(43) Pub. Date: Feb. 19, 2015

(54) METHODS OF INCREASING THE VIABILITY OR LONGEVITY OF AN ORGAN OR ORGAN EXPLANT

(71) Applicant: MODERNA THERAPEUTICS, INC., CAMBRIDGE, MA (US)

(72) Inventors: Stephane Bancel, Cambridge, MA (US); Antonin de Fougerolles, Waterloo (BE)

(21) Appl. No.: 14/508,221

(22) Filed: Oct. 7, 2014

Related U.S. Application Data
(63) Continuation of application No. 13/723,267, filed on Dec. 21, 2012.
(60) Provisional application No. 61/578,271, filed on Dec. 21, 2011.

(51) Int. Cl. A01N 1/02; A61K 38/18

(52) U.S. Cl. CPC A01N 1/0226; A61K 38/1866; A61K 48/00
USPC 514/44 R; 435/1.1

(57) ABSTRACT

The invention relates to compositions and methods for the manufacture and optimization of modified mRNA molecules for their use in improving organ viability and/or longevity.

### CROSS REFERENCE TO RELATED APPLICATIONS

[0001] This application is a continuation of U.S. patent application Ser. No. 13/723,267, filed Dec. 21, 2012 which claims the benefit of U.S. Provisional Application No. 61/578,271, filed Dec. 21, 2011, entitled Methods of Increasing the Viability or Longevity of an Organ or Organ Explant, the contents of which are herein incorporated by reference in its entirety.

### REFERENCE TO SEQUENCE LISTING

[0002] The present application is being filed along with a Sequence Listing in electronic format. The Sequence Listing file, entitled M14USCONSEQLST.txt, was created on Oct. 7, 2014 and is 845,796 bytes in size. The information in electronic format of the Sequence Listing is incorporated herein by reference in its entirety.

### FIELD OF THE INVENTION

[0003] The invention relates to compositions and methods for the manufacture of modified mRNA.

### BACKGROUND OF THE INVENTION

[0004] The preservation of organs, whether for research or in an attempt to increase viability or longevity for future transplant opportunities, is an area of intense investigation. Historically, preservation has been focused on temperature and ischemic control with devices and compositions which attempt to reduce the damage to the organ or tissue. Reperfusion and soaking solutions have been utilized in an effort to mitigate cellular damage to some success. Devices such as ex-vivo organ care systems and portable organ chambers have also been used to prolong the useable life of organs and tissues.

[0005] There remains however, a need for a more robust system for the direct modulation of the physiology of cells and tissues to prolong organ viability while avoiding the destructive reactive systems in place such as free radical damage and activation of the immune system.

[0006] The present invention provides modified RNA molecules, specifically modified mRNA molecules, which function to optimize cellular physiology via improvements to protein synthesis. The optimization involves the use of novel chemistries incorporated into mRNA molecules which will deliver a translatable transcript of interest.

[0007] Naturally occurring RNAs are synthesized from four basic ribonucleotides: ATP, CTP, UTP and GTP, but may contain post-transcriptionally modified nucleotides. Further, approximately one hundred different nucleoside modifications have been identified in RNA (Rozenski, J, Crain, P, and McCloskey, J. (1999). The RNA Modification Database: 1999 update. Nucl Acids Res 27: 196-197).

[0008] The role of nucleoside modifications on the immuno-stimulatory potential, stability, and on the translation efficiency of RNA, and the consequent benefits to this for enhancing protein expression, producing therapeutics and providing tools useful in organ longevity are described herein.

### SUMMARY OF THE INVENTION

[0009] Described herein are compositions and methods for the manufacture and optimization of modified mRNA molecules for their use in improvements to cell viability. Specifically disclosed are methods for increasing the viability or longevity of an organ, tissue, explants or portions thereof.

[0010] In one embodiment is provided a method for increasing the viability or longevity of an organ or tissue explant, or portion thereof comprising contacting said organ or tissue explant, or portion thereof with a composition comprising modified RNA (e.g., modified mRNA). Any organ, tissue or portion thereof may be treated with the compositions of the present invention. Organs may be selected from the heart, lung, brain, liver, basal ganglia, brain stem medulla, midbrain, pons, cerebellum, cerebral cortex, hypothalamus, eye, pituitary, thyroid, parathyroid, esophagus, thymus, adrenal glands, appendix, bladder, gallbladder, intestines (e.g., large intestine and small intestine), kidney, pancreas, spleen, stomach, skin, prostate, testes, ovaries, or uterus. Tissues may be selected from heart valve, bone, vein, middle ear, cartilage, tendon or ligaments.

[0011] In one embodiment the modified RNA composition comprises a formulated modified mRNA and the formulation may be selected from saline, lipids, lipidoids, lipidoids, polymers, liposome formulations, lipid nanoparticles, rapidly eliminated lipid nanoparticles, dynamic polyconjugate formulations, atuplexes, DBTC formulations, PLGA polymers, protamine based agents, cell penetrating peptides, conjugates of sugars, hydrogels, sealants (e.g., surgical sealants) or steroids, and cell-based carrier systems.

[0012] In one embodiment, the modified mRNA is administered to a host organism. That host organism may be a donor or recipient host. Donation does not necessarily suggest that there is a recipient organism. Donation (or harvest) of an organ or tissue may be made in the absence of a recipient.

[0013] In one embodiment, administration to the donor organism occurs either prior to any procedure to remove the organ or tissue or during removal. Administration may be made by soaking, contact, or by delivery to the blood of the donor or recipient. Furthermore, administration may be facilitated at least in part by the use of, or in combination with, a medical device, system or component such as an ex-vivo organ care system.

[0014] In one embodiment, the modified mRNA administered is a pharmaceutical composition which is formulated.

[0015] In one embodiment, the modified mRNA encodes a polypeptide which acts as a radical scavenger or an immunosuppressive agent.

[0016] In one embodiment the modified mRNA encodes a protein such as protein a4beta1, VCAM-1, VEGF, neuregulin1 or thymosin beta-4.

[0017] The details of various embodiments of the invention are set forth in the description below. Other features, objects, and advantages of the invention will be apparent from the description and the drawings, and from the claims.

### DETAILED DESCRIPTION

[0018] Described herein are compositions and methods for the manufacture and optimization of modified mRNA molecules for their use in improvements to cell viability. Specifically disclosed are methods for increasing the viability or longevity of an organ, tissue or explants thereof via the use of modified RNA molecules.

[0019] In general, exogenous nucleic acids, particularly viral nucleic acids, introduced into cells induce an innate immune response, resulting in interferon (IFN) production and cell death. However, it is of great interest for therapeutics, diagnostics, reagents and for biological assays to deliver a nucleic acid, e.g., a ribonucleic acid (RNA) inside a cell, either in vivo or ex vivo, such as to cause intracellular translation of the nucleic acid and production of the encoded protein. Of particular importance is the delivery and function of a non-integrative nucleic acid, as nucleic acids characterized by integration into a target cell are generally imprecise in their expression levels, deleteriously transferable to progeny and neighbor cells, and suffer from the substantial risk of mutation.

[0020] Provided herein in part are nucleic acid molecules encoding polypeptides capable of modulating a cell's status, function and/or activity, and methods of making and using these nucleic acids and polypeptides. As described herein and as in copending, co-owned applications International Application PCT/US2011/046861 filed Aug. 5, 2011 and PCT/US2011/054636 filed Oct. 3, 2011, the contents of which are incorporated by reference herein in their entirety, these modified nucleic acid molecules are capable of reducing the innate immune activity of a population of cells into which they are introduced, thus increasing the efficiency of protein production in that cell population.

### Modified Nucleic Acid Molecules (Modified RNAs)

[0021] This invention provides nucleic acids, including RNAs such as mRNAs that contain one or more modified nucleosides (termed “modified nucleic acids” or “modified nucleic acid molecules”), which have useful properties including the lack of a substantial induction of the innate immune response of a cell into which the mRNA is introduced. Because these modified nucleic acids enhance the efficiency of protein production, intracellular retention of nucleic acids, and viability of contacted cells, as well as possess reduced immunogenicity, these nucleic acids having these properties are termed “enhanced” nucleic acids or modified RNAs herein.

[0022] The term “nucleic acid,” in its broadest sense, includes any compound and/or substance that comprise a polymer of nucleotides linked via a phosphodiester bond. These polymers are often referred to as oligonucleotides.

[0023] Exemplary nucleic acids include ribonucleic acids (RNAs), deoxyribonucleic acids (DNAs), threose nucleic acids (TNAs), glycol nucleic acids (GNAs), peptide nucleic acids (PNAs), locked nucleic acids (LNAs) or hybrids thereof. They may also include RNAi-inducing agents, RNAi agents, siRNAs, shRNAs, miRNAs, antisense RNAs, ribozymes, catalytic DNA, tRNA, RNAs that induce triple helix formation, aptamers, vectors, etc. In preferred embodiments, the modified nucleic acid molecule is one or more messenger RNAs (mRNAs). Modified mRNAs, as used herein may also be termed “mmRNAs”. As described herein, the nucleic acids of the invention do not substantially induce an innate immune response of a cell into which the mRNA is introduced.

[0024] In some embodiments, the nucleic acid is translatable.

[0025] Provided are modified nucleic acids containing a translatable region and one, two, or more than two different nucleoside modifications. In some embodiments, the modified nucleic acid exhibits reduced degradation in a cell into which the nucleic acid is introduced, relative to a corresponding unmodified nucleic acid.

[0026] In another aspect, the present disclosure provides compounds comprising a nucleotide that can disrupts binding of a major groove interacting, e.g. binding, partner with a nucleic acid, wherein the nucleotide has decreased binding affinity to major groove interacting, e.g. binding, partners.

[0027] In some embodiments, the chemical modifications can be located on the sugar moiety of the nucleotide.

[0028] In some embodiments, the chemical modifications can be located on the phosphate backbone of the nucleotide.

[0029] In certain embodiments it is desirable to intracellularly degrade a modified nucleic acid introduced into the cell, for example if precise timing of protein production is desired. Thus, the invention provides a modified nucleic acid containing a degradation domain, which is capable of being acted on in a directed manner within a cell.

### Modifications

[0030] The modified nucleic acids and modified mRNA (mmRNA) of the invention may contain one, two, or more different modifications. In some embodiments, modified nucleic acid molecules and mmRNA may contain one, two, or more different nucleoside or nucleotide modifications. In some embodiments, a modified nucleic acid molecule or mmRNA (e.g., having one or more mmRNA molecules) introduced to a cell may exhibit reduced degradation in the cell, as compared to an unmodified nucleic acid molecule or mmRNA.

[0031] The modified nucleic acid molecules and mmRNA can include any useful modification, such as to the sugar, the nucleobase (e.g., one or more modifications of a nucleobase, such as by replacing or substituting an atom of a pyrimidine nucleobase with optionally substituted amino, optionally substituted thiol, optionally substituted alkyl (e.g., methyl or ethyl), or halo (e.g., chloro or fluoro), or the internucleoside linkage (e.g., one or more modification to the phosphodiester backbone). In certain embodiments, modifications are present in both the sugar and the internucleoside linkage (e.g., one or modifications, such as those present in ribonucleic acids (RNA), deoxyribonucleic acids (DNAs), threose nucleic acids (TNAs), glycol nucleic acids (GNAs), peptide nucleic acids (PNAs), locked nucleic acids (LNAs) or hybrids thereof). Additional modifications are described herein.

[0032] As described herein, the modified nucleic acid molecules and mmRNA of the invention do not substantially induce an innate immune response of a cell into which the mRNA is introduced. In certain embodiments, it may desirable to intracellularly degrade a modified nucleic acid molecule or modified mRNA introduced into the cell. For example, degradation of a modified nucleic acid molecule or modified mRNA may be preferable if precise timing of protein production is desired. Thus, in some embodiments, the invention provides a modified nucleic acid molecule containing a degradation domain, which is capable of being acted on in a directed manner within a cell. In another aspect, the present disclosure provides nucleic acids comprising a nucleoside or nucleotide that can disrupt the binding of a major groove interacting, e.g. binding, partner with the nucleic acid (e.g., where the modified nucleotide has decreased binding affinity to major groove interacting partner, as compared to an unmodified nucleotide).

[0033] The modified nucleic acid molecule and mmRNA can optionally include other agents (e.g., RNAi-inducing agents, RNAi agents, siRNA, shRNA, miRNA, antisense RNA, ribozymes, catalytic DNA, tRNA, RNA that induce triple helix formation, aptamers, vectors, etc.). In some embodiments, the modified nucleic acid molecules or mmRNA may include one or more messenger RNA (mRNA) and one or more modified nucleoside or nucleotides (e.g., mmRNA molecules). Details for these modified nucleic acid molecules and mmRNA follow.

### Modified Nucleic Acids

[0034] The modified nucleic acids or mmRNA of the invention may include a first region of linked nucleosides encoding a polypeptide of interest, a first flanking region located at the 5′ terminus of the first region, and a second flanking region located at the 3′ terminus of the first region.

[0035] In some embodiments, the modified nucleic acids or mmRNA includes n number of linked nucleosides having Formula (Ia) or Formula (Ia-1):

[chemical structure]

or a pharmaceutically acceptable salt or stereoisomer thereof, wherein

[0036] U is O, S, N(R^{U})ₙᵤ, or C(R^{U})ₙᵤ, wherein nu is an integer from 0 to 2 and each R^{U} is, independently, H, halo, or optionally substituted alkyl;

[0037] --- is a single bond or absent;

[0038] each of R^{1′}, R^{2′}, R^{1″}, R^{2″}, R¹, R², R³, R⁴, and R⁵ is, if present, independently, H, halo, hydroxy, thiol, optionally substituted alkyl, optionally substituted alkoxy, optionally substituted alkenyloxy, optionally substituted alkynyloxy, optionally substituted aminoalkoxy, optionally substituted alkoxyalkoxy, optionally substituted hydroxyalkoxy, optionally substituted amino, azido, optionally substituted aryl, optionally substituted aminoalkyl, optionally substituted aminoalkenyl, optionally substituted aminoalkynyl, or absent; wherein the combination of R³ with one or more of R^{1′}, R^{1″}, R^{2′}, R^{2″}, or R⁵ (e.g., the combination of R^{1′} and R³, the combination of R^{1″} and R³, the combination of R^{2′} and R³, the combination of R^{2″} and R³, or the combination of R⁵ and R³) can join together to form optionally substituted alkylene or optionally substituted heteroalkylene and, taken together with the carbons to which they are attached, provide an optionally substituted heterocyclyl (e.g., a bicyclic, tricyclic, or tetracyclic heterocyclyl); wherein the combination of R⁵ with one or more of R^{1′}, R^{1″}, R^{2′}, or R^{2″} (e.g., the combination of R^{1′} and R⁵, the combination of R^{1″} and R⁵, the combination of R^{2′} and R⁵, or the combination of R^{2″} and R⁵) can join together to form optionally substituted alkylene or optionally substituted heteroalkylene and, taken together with the carbons to which they are attached, provide an optionally substituted heterocyclyl (e.g., a bicyclic, tricyclic, or tetracyclic heterocyclyl); and wherein the combination of R⁴ and one or more of R^{1′}, R^{1″}, R^{2′}, R^{2″}, R³, or R⁵ can join together to form optionally substituted alkylene or optionally substituted heteroalkylene and, taken together with the carbons to which they are attached, provide an optionally substituted heterocyclyl (e.g., a bicyclic, tricyclic, or tetracyclic heterocyclyl);

[0039] each of m′ and m″ is, independently, an integer from 0 to 3 (e.g., from 0 to 2, from 0 to 1, from 1 to 3, or from 1 to 2);

[0040] each of Y¹, Y², and Y³, is, independently, O, S, Se, —NR^{N1}—, optionally substituted alkylene, or optionally substituted heteroalkylene, wherein R^{N1} is H, optionally substituted alkyl, optionally substituted alkenyl, optionally substituted alkynyl, optionally substituted aryl, or absent;

[0041] each Y⁴ is, independently, H, hydroxy, thiol, boranyl, optionally substituted alkyl, optionally substituted alkenyl, optionally substituted alkynyl, optionally substituted alkoxy, optionally substituted alkenyloxy, optionally substituted alkynyloxy, optionally substituted thioalkoxy, optionally substituted alkoxyalkoxy, or optionally substituted amino;

[0042] each Y⁵ is, independently, O, S, Se, optionally substituted alkylene (e.g., methylene), or optionally substituted heteroalkylene;

[0043] n is an integer from 1 to 100,000; and

[0044] B is a nucleobase (e.g., a purine, a pyrimidine, or derivatives thereof), wherein the combination of B and R^{1′}, the combination of B and R^{2′}, the combination of B and R^{1″}, or the combination of B and R^{2″} can, taken together with the carbons to which they are attached, optionally form a bicyclic group (e.g., a bicyclic heterocyclyl) or wherein the combination of B, R^{1″}, and R³ or the combination of B, R^{2″}, and R³ can optionally form a tricyclic or tetracyclic group (e.g., a tricyclic or tetracyclic heterocyclyl, such as in Formula (IIo)-(IIp) herein). In some embodiments, the modified nucleic acid or mmRNA includes a modified ribose.

[0045] In some embodiments, the modified nucleic acid or mmRNA includes n number of linked nucleosides having Formula (Ia-2)-(Ia-5) or a pharmaceutically acceptable salt or stereoisomer thereof.

[chemical structure]

[0046] In some embodiments, the modified nucleic acid or mmRNA includes n number of linked nucleosides having Formula (Ib) or Formula (Ib-1):

[chemical structure]

or a pharmaceutically acceptable salt or stereoisomer thereof, wherein

[0047] U is O, S, N(R^{U})ₙᵤ, or C(R^{U})ₙᵤ, wherein nu is an integer from 0 to 2 and each R^{U} is, independently, H, halo, or optionally substituted alkyl;

[0048] --- is a single bond or absent;

[0049] each of R¹, R^{3′}, R^{3″}, and R⁴ is, independently, H, halo, hydroxy, optionally substituted alkyl, optionally substituted alkoxy, optionally substituted alkenyloxy, optionally substituted alkynyloxy, optionally substituted aminoalkoxy, optionally substituted alkoxyalkoxy, optionally substituted hydroxyalkoxy, optionally substituted amino, azido, optionally substituted aryl, optionally substituted aminoalkyl, optionally substituted aminoalkenyl, optionally substituted aminoalkynyl, or absent; and wherein the combination of R¹ and R^{3′} or the combination of R¹ and R^{3″} can be taken together to form optionally substituted alkylene or optionally substituted heteroalkylene (e.g., to produce a locked nucleic acid);

[0050] each R⁵ is, independently, H, halo, hydroxy, optionally substituted alkyl, optionally substituted alkoxy, optionally substituted alkenyloxy, optionally substituted alkynyloxy, optionally substituted aminoalkoxy, optionally substituted alkoxyalkoxy, or absent;

[0051] each of Y¹, Y², and Y³ is, independently, O, S, Se, —NR^{N1}—, optionally substituted alkylene, or optionally substituted heteroalkylene, wherein R^{N1} is H, optionally substituted alkyl, optionally substituted alkenyl, optionally substituted alkynyl, or optionally substituted aryl;

[0052] each Y⁴ is, independently, H, hydroxy, thiol, boranyl, optionally substituted alkyl, optionally substituted alkenyl, optionally substituted alkynyl, optionally substituted alkoxy, optionally substituted alkenyloxy, optionally substituted alkynyloxy, optionally substituted alkoxyalkoxy, or optionally substituted amino;

[0053] n is an integer from 1 to 100,000; and

[0054] B is a nucleobase.

[0055] In some embodiments, the modified nucleic acid or mmRNA includes n number of linked nucleosides having Formula (Ic):

[chemical structure]

or a pharmaceutically acceptable salt or stereoisomer thereof, wherein

[0056] U is O, S, N(R^{U})ₙᵤ, or C(R^{U})ₙᵤ, wherein nu is an integer from 0 to 2 and each R^{U} is, independently, H, halo, or optionally substituted alkyl;
[0057] --- is a single bond or absent;

[0058] each of B¹, B², and B³ is, independently, a nucleobase (e.g., a purine, a pyrimidine, or derivatives thereof, as described herein), H, halo, hydroxy, thiol, optionally substituted alkyl, optionally substituted alkoxy, optionally substituted alkenyloxy, optionally substituted alkynyloxy, optionally substituted aminoalkoxy, optionally substituted alkoxyalkoxy, optionally substituted hydroxyalkoxy, optionally substituted amino, azido, optionally substituted aryl, optionally substituted aminoalkyl, optionally substituted aminoalkenyl, or optionally substituted aminoalkynyl, wherein one and only one of B¹, B², and B³ is a nucleobase;

[0059] each of R^{b1}, R^{b2}, R^{b3}, R³, and R⁵ is, independently, H, halo, hydroxy, thiol, optionally substituted alkyl, optionally substituted alkoxy, optionally substituted alkenyloxy, optionally substituted alkynyloxy, optionally substituted aminoalkoxy, optionally substituted alkoxyalkoxy, optionally substituted hydroxyalkoxy, optionally substituted amino, azido, optionally substituted aryl, optionally substituted aminoalkyl, optionally substituted aminoalkenyl or optionally substituted aminoalkynyl;

[0060] each of Y¹, Y², and Y³, is, independently, O, S, Se, —NR^{N1}—, optionally substituted alkylene, or optionally substituted heteroalkylene, wherein R^{N1} is H, optionally substituted alkyl, optionally substituted alkenyl, optionally substituted alkynyl, or optionally substituted aryl;

[0061] each Y⁴ is, independently, H, hydroxy, thiol, boranyl, optionally substituted alkyl, optionally substituted alkenyl, optionally substituted alkynyl, optionally substituted alkoxy, optionally substituted alkenyloxy, optionally substituted alkynyloxy, optionally substituted thioalkoxy, optionally substituted alkoxyalkoxy, or optionally substituted amino;

[0062] each Y⁵ is, independently, O, S, Se, optionally substituted alkylene (e.g., methylene), or optionally substituted heteroalkylene;

[0063] n is an integer from 1 to 100,000; and

[0064] wherein the ring including U can include one or more double bonds.

[0065] In particular embodiments, the ring including U does not have a double bond between U—CB³R^{b3} or between CB³R^{b3}—C^{B2}R^{b2}.

[0066] In some embodiments, the modified nucleic acid or mmRNA includes n number of linked nucleosides having Formula (Id):

[chemical structure]

or a pharmaceutically acceptable salt or stereoisomer thereof, wherein

[0067] U is O, S, N(R^{U})ₙᵤ, or C(R^{U})ₙᵤ, wherein nu is an integer from 0 to 2 and each R^{U} is, independently, H, halo, or optionally substituted alkyl;

[0068] each R³ is, independently, H, halo, hydroxy, thiol, optionally substituted alkyl, optionally substituted alkoxy, optionally substituted alkenyloxy, optionally substituted alkynyloxy, optionally substituted aminoalkoxy, optionally substituted alkoxyalkoxy, optionally substituted hydroxyalkoxy, optionally substituted amino, azido, optionally substituted aryl, optionally substituted aminoalkyl, optionally substituted aminoalkenyl, or optionally substituted aminoalkynyl;

[0069] each of Y¹, Y², and Y³, is, independently, O, S, Se, —NR^{N1}—, optionally substituted alkylene, or optionally substituted heteroalkylene, wherein R^{N1} is H, optionally substituted alkyl, optionally substituted alkenyl, optionally substituted alkynyl, or optionally substituted aryl;

[0070] each Y⁴ is, independently, H, hydroxy, thiol, boranyl, optionally substituted alkyl, optionally substituted alkenyl, optionally substituted alkynyl, optionally substituted alkoxy, optionally substituted alkenyloxy, optionally substituted alkynyloxy, optionally substituted thioalkoxy, optionally substituted alkoxyalkoxy, or optionally substituted amino;

[0071] each Y⁵ is, independently, O, S, optionally substituted alkylene (e.g., methylene), or optionally substituted heteroalkylene;

[0072] n is an integer from 1 to 100,000; and

[0073] B is a nucleobase (e.g., a purine, a pyrimidine, or derivatives thereof).

[0074] In some embodiments, the modified nucleic acid molecules or modified mRNA includes n number of linked nucleosides having Formula (Ie):

[chemical structure]

or a pharmaceutically acceptable salt or stereoisomer thereof, wherein

[0075] each of U′ and U″ is, independently, O, S, N(R^{U})ₙᵤ, or C(R^{U})ₙᵤ, wherein nu is an integer from 0 to 2 and each R^{U} is, independently, H, halo, or optionally substituted alkyl;

[0076] each R⁶ is, independently, H, halo, hydroxy, thiol, optionally substituted alkyl, optionally substituted alkoxy, optionally substituted alkenyloxy, optionally substituted alkynyloxy, optionally substituted aminoalkoxy, optionally substituted alkoxyalkoxy, optionally substituted hydroxyalkoxy, optionally substituted amino, azido, optionally substituted aryl, optionally substituted aminoalkyl, optionally substituted aminoalkenyl, or optionally substituted aminoalkynyl;

[0077] each Y^{5′} is, independently, O, S, optionally substituted alkylene (e.g., methylene or ethylene), or optionally substituted heteroalkylene;

[0078] n is an integer from 1 to 100,000; and

[0079] B is a nucleobase (e.g., a purine, a pyrimidine, or derivatives thereof).

[0080] In some embodiments, the modified nucleic acid or mmRNA includes n number of linked nucleosides having Formula (If) or (If-1):

[chemical structure]

or a pharmaceutically acceptable salt or stereoisomer thereof, wherein

[0081] each of U′ and U″ is, independently, O, S, N, N(R^{U})ₙᵤ, or C(R^{U})ₙᵤ, wherein nu is an integer from 0 to 2 and each R^{U} is, independently, H, halo, or optionally substituted alkyl (e.g., U′ is O and U″ is N);

[0082] --- is a single bond or absent;

[0083] each of R^{1′}, R^{2′}, R^{1″}, R^{2″}, R³, and R⁴ is, independently, H, halo, hydroxy, thiol, optionally substituted alkyl, optionally substituted alkoxy, optionally substituted alkenyloxy, optionally substituted alkynyloxy, optionally substituted aminoalkoxy, optionally substituted alkoxyalkoxy, optionally substituted hydroxyalkoxy, optionally substituted amino, azido, optionally substituted aryl, optionally substituted aminoalkyl, optionally substituted aminoalkenyl, optionally substituted aminoalkynyl, or absent; and wherein the combination of R^{1′} and R³, the combination of R^{1″} and R³, the combination of R^{2′} and R³, or the combination of R^{2″} and R³ can be taken together to form optionally substituted alkylene or optionally substituted heteroalkylene (e.g., to produce a locked nucleic acid); each of m′ and m″ is, independently, an integer from 0 to 3 (e.g., from 0 to 2, from 0 to 1, from 1 to 3, or from 1 to 2);

[0084] each of Y¹, Y², and Y³, is, independently, O, S, Se, —NR^{N1}—, optionally substituted alkylene, or optionally substituted heteroalkylene, wherein R^{N1} is H, optionally substituted alkyl, optionally substituted alkenyl, optionally substituted alkynyl, optionally substituted aryl, or absent;

[0085] each Y⁴ is, independently, H, hydroxy, thiol, boranyl, optionally substituted alkyl, optionally substituted alkenyl, optionally substituted alkynyl, optionally substituted alkoxy, optionally substituted alkenyloxy, optionally substituted alkynyloxy, optionally substituted thioalkoxy, optionally substituted alkoxyalkoxy, or optionally substituted amino;

[0086] each Y⁵ is, independently, O, S, Se, optionally substituted alkylene (e.g., methylene), or optionally substituted heteroalkylene;

[0087] n is an integer from 1 to 100,000; and

[0088] B is a nucleobase (e.g., a purine, a pyrimidine, or derivatives thereof).

[0089] In some embodiments of the modified nucleic acid or mmRNA (e.g., (Ia)-(Ia-5), (Ib)-(If-1), (IIa)-(IIp), (IIb-1), (IIb-2), (IIc-1)-(IIc-2), (IIn-1), (IIn-2), (IVa)-(IV1), and (IXa)-(IXr)), the ring including U has one or two double bonds.

[0090] In some embodiments of the modified nucleic acid or mmRNA (e.g., Formulas (Ia)-Ia-5), (Ib)-(If-1), (IIa)-(IIp), (IIb-1), (IIb-2), (IIc-1)-(IIc-2), (IIn-1), (IIn-2), (IVa)-(IV1), and (IXa)-(IXr)), each of R¹, R^{1′}, and R^{1″}, if present, is H. In further embodiments, each of R², R^{2′}, and R^{2″}, if present, is, independently, H, halo (e.g., fluoro), hydroxy, optionally substituted alkoxy (e.g., methoxy or ethoxy), or optionally substituted alkoxyalkoxy. In particular embodiments, alkoxyalkoxy is —(CH₂)ₛ₂(OCH₂CH₂)ₛ₁(CH₂)ₛ₃OR′, wherein s1 is an integer from 1 to 10 (e.g., from 1 to 6 or from 1 to 4), each of s2 and s3, independently, is an integer from 0 to 10 (e.g., from 0 to 4, from 0 to 6, from 1 to 4, from 1 to 6, or from 1 to 10), and R′ is H or C₁₋₂₀ alkyl). In some embodiments, s2 is 0, s1 is 1 or 2, s3 is 0 or 1, and R′ is C₁₋₆ alkyl.

[0091] In some embodiments of the modified nucleic acid or mmRNA (e.g., Formulas (Ia)-Ia-5), (Ib)-(If-1), (IIa)-(IIp), (IIb-1), (IIb-2), (IIc-1)-(IIc-2), (IIn-1), (IIn-2), (IVa)-(IV1), and (IXa)-(IXr)), each of R², R^{2′}, and R^{2″}, if present, is H. In further embodiments, each of R¹, R^{1′}, and R^{1″}, if present, is, independently, H, halo (e.g., fluoro), hydroxy, optionally substituted alkoxy (e.g., methoxy or ethoxy), or optionally substituted alkoxyalkoxy. In particular embodiments, alkoxyalkoxy is —(CH₂)ₛ₂(OCH₂CH₂)ₛ₁(CH₂)ₛ₃OR′, wherein s1 is an integer from 1 to 10 (e.g., from 1 to 6 or from 1 to 4), each of s2 and s3, independently, is an integer from 0 to 10 (e.g., from 0 to 4, from 0 to 6, from 1 to 4, from 1 to 6, or from 1 to 10), and R′ is H or C₁₋₂₀ alkyl). In some embodiments, s2 is 0, s1 is 1 or 2, s3 is 0 or 1, and R′ is C₁₋₆ alkyl.

[0092] In some embodiments of the modified nucleic acids or mmRNA (e.g., Formulas (Ia)-Ia-5), (Ib)-(If-1), (IIa)-(IIp), (IIb-1), (IIb-2), (IIc-1)-(IIc-2), (IIn-1), (IIn-2), (IVa)-(IV1), and (IXa)-(IXr)), each of R³, R⁴, and R⁵ is, independently, H, halo (e.g., fluoro), hydroxy, optionally substituted alkyl, optionally substituted alkoxy (e.g., methoxy or ethoxy), or optionally substituted alkoxyalkoxy. In particular embodiments, R³ is H, R⁴ is H, R⁵ is H, or R³, R⁴, and R⁵ are all H. In particular embodiments, R³ is C₁₋₆ alkyl, R⁴ is C₁₋₆ alkyl, R⁵ is C₁₋₆ alkyl, or R³, R⁴, and R⁵ are all C₁₋₆ alkyl. In particular embodiments, R³ and R⁴ are both H, and R⁵ is C₁₋₆ alkyl.

[0093] In some embodiments of the modified nucleic acids or mmRNA (e.g., Formulas (Ia)-Ia-5), (Ib)-(If-1), (IIa)-(IIp), (IIb-1), (IIb-2), (IIc-1)-(IIc-2), (IIn-1), (IIn-2), (IVa)-(IV1), and (IXa)-(IXr)), R³ and R⁵ join together to form optionally substituted alkylene or optionally substituted heteroalkylene and, taken together with the carbons to which they are attached, provide an optionally substituted heterocyclyl (e.g., a bicyclic, tricyclic, or tetracyclic heterocyclyl, such as trans-3′,4′ analogs, wherein R³ and R⁵ join together to form heteroalkylene (e.g., —(CH₂)_{b1}O(CH₂)_{b2}O(CH₂)_{b3}—, wherein each of b1, b2, and b3 are, independently, an integer from 0 to 3).

[0094] In some embodiments of the modified nucleic acids or mmRNA (e.g., Formulas (Ia)-Ia-5), (Ib)-(If-1), (IIa)-(IIp), (IIb-1), (IIb-2), (IIc-1)-(IIc-2), (IIn-1), (IIn-2), (IVa)-(IV1), and (IXa)-(IXr)), R³ and one or more of R^{1′}, R^{1″}, R^{2′}, R^{2″}, or R⁵ join together to form optionally substituted alkylene or optionally substituted heteroalkylene and, taken together with the carbons to which they are attached, provide an optionally substituted heterocyclyl (e.g., a bicyclic, tricyclic, or tetracyclic heterocyclyl, R³ and one or more of R^{1′}, R^{1″}, R^{2′}, R^{2″}, or R⁵ join together to form heteroalkylene (e.g., —(CH₂)_{b1}O(CH₂)_{b2}O(CH₂)_{b3}—, wherein each of b1, b2, and b3 are, independently, an integer from 0 to 3).

[0095] In some embodiments of the modified nucleic acids or mmRNA (e.g., Formulas (Ia)-Ia-5), (Ib)-(If-1), (IIa)-(IIp), (IIb-1), (IIb-2), (IIc-1)-(IIc-2), (IIn-1), (IIn-2), (IVa)-(IV1), and (IXa)-(IXr)), R⁵ and one or more of R^{1′}, R^{1″}, R^{2′}, or R^{2″} join together to form optionally substituted alkylene or optionally substituted heteroalkylene and, taken together with the carbons to which they are attached, provide an optionally substituted heterocyclyl (e.g., a bicyclic, tricyclic, or tetracyclic heterocyclyl, R⁵ and one or more of R^{1′}, R^{1″}, R^{2′}, or R^{2″} join together to form heteroalkylene (e.g., —(CH₂)_{b1}O(CH₂)_{b2}O(CH₂)_{b3}—, wherein each of b1, b2, and b3 are, independently, an integer from 0 to 3).

[0096] In some embodiments of the modified nucleic acids or mmRNA (e.g., Formulas (Ia)-Ia-5), (Ib)-(If-1), (IIa)-(IIp), (IIb-1), (IIb-2), (IIc-1)-(IIc-2), (IIn-1), (IIn-2), (IVa)-(IV1), and (IXa)-(IXr)), each Y² is, independently, O, S, or —NR^{N1}—, wherein R^{N1} is H, optionally substituted alkyl, optionally substituted alkenyl, optionally substituted alkynyl, or optionally substituted aryl. In particular embodiments, Y² is NR^{N1}—, wherein R^{N1} is H or optionally substituted alkyl (e.g., C₁₋₆ alkyl, such as methyl, ethyl, isopropyl, or n-propyl).

[0097] In some embodiments of the modified nucleic acids or mmRNA (e.g., Formulas (Ia)-Ia-5), (Ib)-(If-1), (IIa)-(IIp), (IIb-1), (IIb-2), (IIc-1)-(IIc-2), (IIn-1), (IIn-2), (IVa)-(IV1), and (IXa)-(IXr)), each Y³ is, independently, O or S.

[0098] In some embodiments of the modified nucleic acids or mmRNA (e.g., Formulas (Ia)-Ia-5), (Ib)-(If-1), (IIa)-(IIp), (IIb-1), (IIb-2), (IIc-1)-(IIc-2), (IIn-1), (IIn-2), (IVa)-(IV1), and (IXa)-(IXr)), R¹ is H; each R² is, independently, H, halo (e.g., fluoro), hydroxy, optionally substituted alkoxy (e.g., methoxy or ethoxy), or optionally substituted alkoxyalkoxy (e.g., —(CH₂)ₛ₂(OCH₂CH₂)ₛ₁(CH₂)ₛ₃OR′, wherein s1 is an integer from 1 to 10 (e.g., from 1 to 6 or from 1 to 4), each of s2 and s3, independently, is an integer from 0 to 10 (e.g., from 0 to 4, from 0 to 6, from 1 to 4, from 1 to 6, or from 1 to 10), and R′ is H or C₁₋₂₀ alkyl, such as wherein s2 is 0, s1 is 1 or 2, s3 is 0 or 1, and R′ is C₁₋₆ alkyl); each Y² is, independently, 0 or —NR^{N1}—, wherein R^{N1} is H, optionally substituted alkyl, optionally substituted alkenyl, optionally substituted alkynyl, or optionally substituted aryl (e.g., wherein R^{N1} is H or optionally substituted alkyl (e.g., C₁₋₆ alkyl, such as methyl, ethyl, isopropyl, or n-propyl)); and each Y³ is, independently, O or S (e.g., S). In further embodiments, R³ is H, halo (e.g., fluoro), hydroxy, optionally substituted alkyl, optionally substituted alkoxy (e.g., methoxy or ethoxy), or optionally substituted alkoxyalkoxy. In yet further embodiments, each Y¹ is, independently, O or —NR^{N1}—, wherein R^{N1} is H, optionally substituted alkyl, optionally substituted alkenyl, optionally substituted alkynyl, or optionally substituted aryl (e.g., wherein R^{N1} is H or optionally substituted alkyl (e.g., C₁₋₆ alkyl, such as methyl, ethyl, isopropyl, or n-propyl)); and each Y⁴ is, independently, H, hydroxy, thiol, optionally substituted alkyl, optionally substituted alkoxy, optionally substituted thioalkoxy, optionally substituted alkoxyalkoxy, or optionally substituted amino.

[0099] In some embodiments of the modified nucleic acids or mmRNA (e.g., Formulas (Ia)-(Ia-5), (Ib)-(If-1), (IIa)-(IIp), (IIb-1), (IIb-2), (IIc-1)-(IIc-2), (IIn-1), (IIn-2), (IVa)-(IV1), and (IXa)-(IXr)), each R¹ is, independently, H, halo (e.g., fluoro), hydroxy, optionally substituted alkoxy (e.g., methoxy or ethoxy), or optionally substituted alkoxyalkoxy (e.g., —(CH₂)ₛ₂(OCH₂CH₂)ₛ₁(CH₂)ₛ₃OR′, wherein s1 is an integer from 1 to 10 (e.g., from 1 to 6 or from 1 to 4), each of s2 and s3, independently, is an integer from 0 to 10 (e.g., from 0 to 4, from 0 to 6, from 1 to 4, from 1 to 6, or from 1 to 10), and R′ is H or C₁₋₂₀ alkyl, such as wherein s2 is 0, s1 is 1 or 2, s3 is 0 or 1, and R′ is C₁₋₆ alkyl); R² is H; each Y² is, independently, O or —NR^{N1}—, wherein R^{N1} is H, optionally substituted alkyl, optionally substituted alkenyl, optionally substituted alkynyl, or optionally substituted aryl (e.g., wherein R^{N1} is H or optionally substituted alkyl (e.g., C₁₋₆ alkyl, such as methyl, ethyl, isopropyl, or n-propyl)); and each Y³ is, independently, O or S (e.g., S). In further embodiments, R³ is H, halo (e.g., fluoro), hydroxy, optionally substituted alkyl, optionally substituted alkoxy (e.g., methoxy or ethoxy), or optionally substituted alkoxyalkoxy. In yet further embodiments, each Y¹ is, independently, O or —NR^{N1}—, wherein R^{N1} is H, optionally substituted alkyl, optionally substituted alkenyl, optionally substituted alkynyl, or optionally substituted aryl (e.g., wherein R^{N1} is H or optionally substituted alkyl (e.g., C₁₋₆ alkyl, such as methyl, ethyl, isopropyl, or n-propyl)); and each Y⁴ is, independently, H, hydroxy, thiol, optionally substituted alkyl, optionally substituted alkoxy, optionally substituted thioalkoxy, optionally substituted alkoxyalkoxy, or optionally substituted amino.

[0100] In some embodiments of the modified nucleic acids or mmRNA (e.g., Formulas (Ia)-(Ia-5), (Ib)-(If-1), (IIa)-(IIp), (IIb-1), (IIb-2), (IIc-1)-(IIc-2), (IIn-1), (IIn-2), (IVa)-(IV1), and (IXa)-(IXr)), the ring including U is in the β-D (e.g., β-D-ribo) configuration.

[0101] In some embodiments of the modified nucleic acids or mmRNA (e.g Formulas (Ia)-(Ia-5), (Ib)-(If-1), (IIa)-(IIp), (IIb-1), (IIb-2), (IIc-1)-(IIc-2), (IIn-1), (IIn-2), (IVa)-(IV1), and (IXa)-(IXr)), the ring including U is in the α-L (e.g., α-L-ribo) configuration.

[0102] In some embodiments of the modified nucleic acids or mmRNA (e.g., Formulas (Ia)-(Ia-5), (Ib)-(If-1), (IIa)-(IIp), (IIb-1), (IIb-2), (IIc-1)-(IIc-2), (IIn-1), (IIn-2), (IVa)-(IV1), and (IXa)-(IXr)), one or more B is not pseudouridine (ψ) or 5-methyl-cytidine (m⁵C). In some embodiments, about 10% to about 100% of B nucleobases is not ψ or m⁵C (e.g., from 10% to 20%, from 10% to 35%, from 10% to 50%, from 10% to 60%, from 10% to 75%, from 10% to 90%, from 10% to 95%, from 10% to 98%, from 10% to 99%, from 20% to 35%, from 20% to 50%, from 20% to 60%, from 20% to 75%, from 20% to 90%, from 20% to 95%, from 20% to 98%, from 20% to 99%, from 20% to 100%, from 50% to 60%, from 50% to 75%, from 50% to 90%, from 50% to 95%, from 50% to 98%, from 50% to 99%, from 50% to 100%, from 75% to 90%, from 75% to 95%, from 75% to 98%, from 75% to 99%, and from 75% to 100% of n number of B is not ψ or m⁵C). In some embodiments, B is not ψ or m⁵C.

[0103] In some embodiments of the modified nucleic acids or mmRNA (e.g., Formulas (Ia)-(Ia-5), (Ib)-(If-1), (IIa)-(IIp), (IIb-1), (IIb-2), (IIc-1)-(IIc-2), (IIn-1), (IIn-2), (IVa)-(IV1), and (IXa)-(IXr)), when B is an unmodified nucleobase selected from cytosine, guanine, uracil and adenine, then at least one of Y¹, Y², or Y³ is not O.

[0104] In some embodiments, the modified nucleic acids or mmRNA includes a modified ribose. In some embodiments, modified nucleic acids or mmRNA includes n number of linked nucleosides having Formula (IIa)-(IIc):

[chemical structure]

or a pharmaceutically acceptable salt or stereoisomer thereof. In particular embodiments, U is O or C(R^{U})ₙᵤ, wherein nu is an integer from 0 to 2 and each R^{U} is, independently, H, halo, or optionally substituted alkyl (e.g., U is —CH₂— or —CH—). In other embodiments, each of R¹, R², R³, R⁴, and R⁵ is, independently, H, halo, hydroxy, thiol, optionally substituted alkyl, optionally substituted alkoxy, optionally substituted alkenyloxy, optionally substituted alkynyloxy, optionally substituted aminoalkoxy, optionally substituted alkoxyalkoxy, optionally substituted hydroxyalkoxy, optionally substituted amino, azido, optionally substituted aryl, optionally substituted aminoalkyl, optionally substituted aminoalkenyl, optionally substituted aminoalkynyl, or absent (e.g., each R¹ and R² is, independently, H, halo, hydroxy, optionally substituted alkyl, or optionally substituted alkoxy; each R³ and R⁴ is, independently, H or optionally substituted alkyl; and R⁵ is H or hydroxy), and [symbol] is a single bond or double bond.

[0105] In particular embodiments, the modified nucleic acid or mmRNA includes n number of linked nucleosides having Formula (IIb-1)-(IIb-2):

[chemical structure]

or a pharmaceutically acceptable salt or stereoisomer thereof. In some embodiments, U is O or C(R^{U})ₙᵤ, wherein nu is an integer from 0 to 2 and each R^{U} is, independently, H, halo, or optionally substituted alkyl (e.g., U is —CH₂— or —CH—). In other embodiments, each of R¹ and R² is, independently, H, halo, hydroxy, thiol, optionally substituted alkyl, optionally substituted alkoxy, optionally substituted alkenyloxy, optionally substituted alkynyloxy, optionally substituted aminoalkoxy, optionally substituted alkoxyalkoxy, optionally substituted hydroxyalkoxy, optionally substituted amino, azido, optionally substituted aryl, optionally substituted aminoalkyl, optionally substituted aminoalkenyl, optionally substituted aminoalkynyl, or absent (e.g., each R¹ and R² is, independently, H, halo, hydroxy, optionally substituted alkyl, or optionally substituted alkoxy, e.g., H, halo, hydroxy, alkyl, or alkoxy). In particular embodiments, R² is hydroxy or optionally substituted alkoxy (e.g., methoxy, ethoxy, or any described herein).

[0106] In particular embodiments, the modified nucleic acid or mmRNA includes n number of linked nucleosides having Formula (IIc-1)-(IIc-4):

[chemical structure]

or a pharmaceutically acceptable salt or stereoisomer thereof. In some embodiments, U is O or C(R^{U})ₙᵤ, wherein nu is an integer from 0 to 2 and each R^{U} is, independently, H, halo, or optionally substituted alkyl (e.g., U is —CH₂— or —CH—). In some embodiments, each of R¹, R², and R³ is, independently, H, halo, hydroxy, thiol, optionally substituted alkyl, optionally substituted alkoxy, optionally substituted alkenyloxy, optionally substituted alkynyloxy, optionally substituted aminoalkoxy, optionally substituted alkoxyalkoxy, optionally substituted hydroxyalkoxy, optionally substituted amino, azido, optionally substituted aryl, optionally substituted aminoalkyl, optionally substituted aminoalkenyl, optionally substituted aminoalkynyl, or absent (e.g., each R¹ and R² is, independently, H, halo, hydroxy, optionally substituted alkyl, or optionally substituted alkoxy, e.g., H, halo, hydroxy, alkyl, or alkoxy; and each R³ is, independently, H or optionally substituted alkyl)). In particular embodiments, R² is optionally substituted alkoxy (e.g., methoxy or ethoxy, or any described herein). In particular embodiments, R¹ is optionally substituted alkyl, and R² is hydroxy. In other embodiments, R¹ is hydroxy, and R² is optionally substituted alkyl. In further embodiments, R³ is optionally substituted alkyl.

[0107] In some embodiments, the modified nucleic acids or mmRNA includes an acyclic modified ribose. In some embodiments, the modified nucleic acids or mmRNA includes n number of linked nucleosides having Formula (IId)-(IIf):

[chemical structure]

or a pharmaceutically acceptable salt or stereoisomer thereof

[0108] In some embodiments, the modified nucleic acids or mmRNA includes an acyclic modified hexitol. In some embodiments, the modified nucleic acids or mmRNA includes n number of linked nucleosides having Formula (IIg)-(IIj):

[chemical structure]

or a pharmaceutically acceptable salt or stereoisomer thereof.

[0109] In some embodiments, the modified nucleic acids or mmRNA includes a sugar moiety having a contracted or an expanded ribose ring. In some embodiments, the modified nucleic acids or mmRNA includes n number of linked nucleosides having Formula (IIk)-(IIm):

[chemical structure]

or a pharmaceutically acceptable salt or stereoisomer thereof, wherein each of R^{1′}, R^{1″}, R^{2′}, and R^{2″} is, independently, H, halo, hydroxy, optionally substituted alkyl, optionally substituted alkoxy, optionally substituted alkenyloxy, optionally substituted alkynyloxy, optionally substituted aminoalkoxy, optionally substituted alkoxyalkoxy, or absent; and wherein the combination of R^{2′} and R³ or the combination of R^{2″} and R³ can be taken together to form optionally substituted alkylene or optionally substituted heteroalkylene.

[0110] In some embodiments, the modified nucleic acids or mmRNA includes a locked modified ribose. In some embodiments, the modified nucleic acids or mmRNA includes n number of linked nucleosides having Formula (IIn):

[chemical structure]

or a pharmaceutically acceptable salt or stereoisomer thereof, wherein R^{3′} is O, S, or —NR^{N1}—, wherein R^{N1} is H, optionally substituted alkyl, optionally substituted alkenyl, optionally substituted alkynyl, or optionally substituted aryl and R^{3″} is optionally substituted alkylene (e.g., —CH₂—, —CH₂CH₂—, or —CH₂CH₂CH₂—) or optionally substituted heteroalkylene (e.g., —CH₂NH—, —CH₂CH₂NH—, —CH₂OCH₂—, or —CH₂CH₂OCH₂—) (e.g., R^{3′} is O and R^{3″} is optionally substituted alkylene (e.g., —CH₂—, —CH₂CH₂—, or —CH₂CH₂CH₂—)).

[0111] In some embodiments, the modified nucleic acid or mmRNA includes n number of linked nucleosides having Formula (IIn-1)-(II-n2):

[chemical structure]

or a pharmaceutically acceptable salt or stereoisomer thereof, wherein R^{3′} is O, S, or —NR^{N1}—, wherein R^{N1} is H, optionally substituted alkyl, optionally substituted alkenyl, optionally substituted alkynyl, or optionally substituted aryl and R^{3″} is optionally substituted alkylene (e.g., —CH₂—, —CH₂CH₂—, or —CH₂CH₂CH₂—) or optionally substituted heteroalkylene (e.g., —CH₂NH—, —CH₂CH₂NH—, —CH₂OCH₂—, or —CH₂CH₂OCH₂—) (e.g., R^{3′} is O and R^{3″} is optionally substituted alkylene (e.g., —CH₂—, —CH₂CH₂—, or —CH₂CH₂CH₂—)).

[0112] In some embodiments, the modified nucleic acids or mmRNA includes a locked modified ribose that forms a tetracyclic heterocyclyl. In some embodiments, the modified nucleic acids or mmRNA includes n number of linked nucleosides having Formula (IIo):

[chemical structure]

or a pharmaceutically acceptable salt or stereoisomer thereof, wherein R^{12a}, R^{12c}, T^{1′}, T^{1″}, T^{2′}, T^{2″}, V¹, and V³ are as described herein.

[0113] Any of the formulas for the modified nucleic acids or mmRNA can include one or more nucleobases described herein (e.g., Formulas (b1)-(b43)).

[0114] In one embodiment, the present invention provides methods of preparing a modified nucleic acids or mmRNA comprising at least one nucleotide (e.g., mmRNA molecule), wherein the modified nucleic acid comprises n number of nucleosides having Formula (Ia), as defined herein:

[chemical structure]

the method comprising reacting a compound of Formula (IIIa), as defined herein:

[chemical structure]

with an RNA polymerase, and a cDNA template.

[0115] In a further embodiment, the present invention provides methods of amplifying a modified nucleic acids or mmRNA comprising at least one nucleotide (e.g., mmRNA molecule), the method comprising: reacting a compound of Formula (IIIa), as defined herein, with a primer, a cDNA template, and an RNA polymerase.

[0116] In one embodiment, the present invention provides methods of preparing a modified nucleic acids or mmRNA comprising at least one nucleotide (e.g., mmRNA molecule), wherein the modified nucleic acid comprises n number of nucleosides having Formula (Ia-1), as defined herein:

[chemical structure]

the method comprising reacting a compound of Formula (IIIa-1), as defined herein:

[chemical structure]

with an RNA polymerase, and a cDNA template.

[0117] In a further embodiment, the present invention provides methods of amplifying a modified nucleic acids or mmRNA comprising at least one nucleotide (e.g., mmRNA molecule), the method comprising reacting a compound of Formula (IIIa-1), as defined herein, with a primer, a cDNA template, and an RNA polymerase.

[0118] In one embodiment, the present invention provides methods of preparing a modified mRNA comprising at least one nucleotide (e.g., mmRNA molecule), wherein the polynucleotide comprises n number of nucleosides having Formula (Ia-2), as defined herein:

[chemical structure]

the method comprising reacting a compound of Formula (IIIa-2), as defined herein:

[chemical structure]

with an RNA polymerase, and a cDNA template.

[0119] In a further embodiment, the present invention provides methods of amplifying a modified mRNA comprising at least one nucleotide (e.g., mmRNA molecule), the method comprising:

[0120] reacting a compound of Formula (IIIa-2), as defined herein, with a primer, a cDNA template, and an RNA polymerase.

[0121] In some embodiments, the reaction may be repeated from 1 to about 7,000 times. In any of the embodiments herein, B may be a nucleobase of Formula (b1)-(b43).

[0122] The modified nucleic acids and mmRNA can optionally include 5′ and/or 3′ flanking regions, which are described herein.

Modified RNA (e.g. mmRNA) Molecules

[0123] The present invention also includes building blocks, e.g., modified ribonucleosides, modified ribonucleotides, of modified RNA (mmRNA) molecules. For example, these mmRNA can be useful for preparing the modified nucleic acids or mmRNA of the invention.

[0124] In some embodiments, the building block molecule has Formula (IIIa) or (IIIa-1):

[chemical structure]

or a pharmaceutically acceptable salt or stereoisomer thereof, wherein the substituents are as described herein (e.g., for Formula (Ia) and (Ia-1)), and wherein when B is an unmodified nucleobase selected from cytosine, guanine, uracil and adenine, then at least one of Y¹, Y², or Y³ is not O.

[0125] In some embodiments, the building block molecule, which may be incorporated into a modified nucleic acid or mmRNA, has Formula (IVa)-(IVb):

[chemical structure]

or a pharmaceutically acceptable salt or stereoisomer thereof, wherein B is as described herein (e.g., any one of (b1)-(b43)). In particular embodiments, Formula (IVa) or (IVb) is combined with a modified uracil (e.g., any one of formulas (b1)-(b9), (b21)-(b23), and (b28)-(b31), such as formula (b1), (b8), (b28), (b29), or (b30)). In particular embodiments, Formula (IVa) or (IVb) is combined with a modified cytosine (e.g., any one of formulas (b10)-(b14), (b24), (b25), and (b32)-(b36), such as formula (b10) or (b32)). In particular embodiments, Formula (IVa) or (IVb) is combined with a modified guanine (e.g., any one of formulas (b15)-(b17) and (b37)-(b40)). In particular embodiments, Formula (IVa) or (IVb) is combined with a modified adenine (e.g., any one of formulas (b18)-(b20) and (b41)-(b43)).

[0126] In some embodiments, the building block molecule, which may be incorporated into a modified nucleic acid molecule or mmRNA, has Formula (IVc)-(IVk):

[chemical structure]

[chemical structure]

or a pharmaceutically acceptable salt or stereoisomer thereof, wherein B is as described herein (e.g., any one of (b1)-(b43)). In particular embodiments, one of Formulas (IVc)-(IVk) is combined with a modified uracil (e.g., any one of formulas (b1)-(b9), (b21)-(b23), and (b28)-(b31), such as formula (b1), (b8), (b28), (b29), or (b30)). In particular embodiments, one of Formulas (IVc)-(IVk) is combined with a modified cytosine (e.g., any one of formulas (b10)-(b14), (b24), (b25), and (b32)-(b36), such as formula (b10) or (b32)). In particular embodiments, one of Formulas (IVc)-(IVk) is combined with a modified guanine (e.g., any one of formulas (b15)-(b17) and (b37)-(b40)). In particular embodiments, one of Formulas (IVc)-(IVk) is combined with a modified adenine (e.g., any one of formulas (b18)-(b20) and (b41)-(b43)).

[0127] In other embodiments, the building block molecule, which may be incorporated into a modified nucleic acid molecule or mmRNA, has Formula (Va) or (Vb):

[chemical structure]

or a pharmaceutically acceptable salt or stereoisomer thereof, wherein B is as described herein (e.g., any one of (b1)-(b43)).

[0128] In other embodiments, the building block molecule, which may be incorporated into a modified nucleic acid molecule or mmRNA, has Formula (IXa)-(IXd):

[chemical structure]

or a pharmaceutically acceptable salt or stereoisomer thereof, wherein B is as described herein (e.g., any one of (b1)-(b43)). In particular embodiments, one of Formulas (IXa)-(IXd) is combined with a modified uracil (e.g., any one of formulas (b1)-(b9), (b21)-(b23), and (b28)-(b31), such as formula (b1), (b8), (b28), (b29), or (b30)). In particular embodiments, one of Formulas (IXa)-(IXd) is combined with a modified cytosine (e.g., any one of formulas (b10)-(b14), (b24), (b25), and (b32)-(b36), such as formula (b10) or (b32)). In particular embodiments, one of Formulas (IXa)-(IXd) is combined with a modified guanine (e.g., any one of formulas (b15)-(b17) and (b37)-(b40)). In particular embodiments, one of Formulas (IXa)-(IXd) is combined with a modified adenine (e.g., any one of formulas (b18)-(b20) and (b41)-(b43)).

[0129] In other embodiments, the building block molecule, which may be incorporated into a modified nucleic acid molecule or mmRNA, has Formula (IXe)-(IXg):

[chemical structure]

or a pharmaceutically acceptable salt or stereoisomer thereof, wherein B is as described herein (e.g., any one of (b1)-(b43)). In particular embodiments, one of Formulas (IXe)-(IXg) is combined with a modified uracil (e.g., any one of formulas (b1)-(b9), (b21)-(b23), and (b28)-(b31), such as formula (b1), (b8), (b28), (b29), or (b30)). In particular embodiments, one of Formulas (IXe)-(IXg) is combined with a modified cytosine (e.g., any one of formulas (b10)-(b14), (b24), (b25), and (b32)-(b36), such as formula (b10) or (b32)). In particular embodiments, one of Formulas (IXe)-(IXg) is combined with a modified guanine (e.g., any one of formulas (b15)-(b17) and (b37)-(b40)). In particular embodiments, one of Formulas (IXe)-(IXg) is combined with a modified adenine (e.g., any one of formulas (b18)-(b20) and (b41)-(b43)).

[0130] In other embodiments, the building block molecule, which may be incorporated into a modified nucleic acid molecule or mmRNA, has Formula (IXh)-(IXk):

[chemical structure]

or a pharmaceutically acceptable salt or stereoisomer thereof, wherein B is as described herein (e.g., any one of (b1)-(b43)). In particular embodiments, one of Formulas (IXh)-(IXk) is combined with a modified uracil (e.g., any one of formulas (b1)-(b9), (b21)-(b23), and (b28)-(b31), such as formula (b1), (b8), (b28), (b29), or (b30)). In particular embodiments, one of Formulas (IXh)-(IXk) is combined with a modified cytosine (e.g., any one of formulas (b10)-(b14), (b24), (b25), and (b32)-(b36), such as formula (b10) or (b32)). In particular embodiments, one of Formulas (IXh)-(IXk) is combined with a modified guanine (e.g., any one of formulas (b15)-(b17) and (b37)-(b40)). In particular embodiments, one of Formulas (IXh)-(IXk) is combined with a modified adenine (e.g., any one of formulas (b18)-(b20) and (b41)-(b43)).

[0131] In other embodiments, the building block molecule, which may be incorporated into a modified nucleic acid molecule or mmRNA, has Formula (IX1)-(IXr):

[chemical structure]

or a pharmaceutically acceptable salt or stereoisomer thereof, wherein each r1 and r2 is, independently, an integer from 0 to 5 (e.g., from 0 to 3, from 1 to 3, or from 1 to 5) and B is as described herein (e.g., any one of (b1)-(b43)). In particular embodiments, one of Formulas (IX1)-(IXr) is combined with a modified uracil (e.g., any one of formulas (b1)-(b9), (b21)-(b23), and (b28)-(b31), such as formula (b1), (b8), (b28), (b29), or (b30)). In particular embodiments, one of Formulas (IX1)-(IXr) is combined with a modified cytosine (e.g., any one of formulas (b10)-(b14), (b24), (b25), and (b32)-(b36), such as formula (b10) or (b32)). In particular embodiments, one of Formulas (IX1)-(IXr) is combined with a modified guanine (e.g., any one of formulas (b15)-(b17) and (b37)-(b40)). In particular embodiments, one of Formulas (IX1)-(IXr) is combined with a modified adenine (e.g., any one of formulas (b18)-(b20) and (b41)-(b43)).

[0132] In some embodiments, the building block molecule, which may be incorporated into a modified nucleic acid molecules or mmRNA, can be selected from the group consisting of:

[chemical structure]

[chemical structure]

or a pharmaceutically acceptable salt or stereoisomer thereof, wherein each r is, independently, an integer from 0 to 5 (e.g., from 0 to 3, from 1 to 3, or from 1 to 5).

[0133] In some embodiments, the building block molecule, which may be incorporated into a modified nucleic acid molecule or mmRNA, can be selected from the group consisting of:

[chemical structure]

[chemical structure]

or a pharmaceutically acceptable salt or stereoisomer thereof, wherein each r is, independently, an integer from 0 to 5 (e.g., from 0 to 3, from 1 to 3, or from 1 to 5) and s1 is as described herein.

[0134] In some embodiments, the building block molecule, which may be incorporated into a nucleic acid (e.g., RNA, mRNA, or mmRNA), is a modified uridine (e.g., selected from the group consisting of:

[chemical structure]

[chemical structure]

[chemical structure]

[chemical structure]

[chemical structure]

[chemical structure]

[chemical structure]

[chemical structure]

[chemical structure]

[chemical structure]

[chemical structure]

[chemical structure]

[chemical structure]

[chemical structure]

[chemical structure]

[chemical structure]

[chemical structure]

[chemical structure]

[chemical structure]

[chemical structure]

[chemical structure]

or a pharmaceutically acceptable salt or stereoisomer thereof, wherein Y¹, Y³, Y⁴, Y⁶, and r are as described herein (e.g., each r is, independently, an integer from 0 to 5, such as from 0 to 3, from 1 to 3, or from 1 to 5)).

[0135] In some embodiments, the building block molecule, which may be incorporated into a modified nucleic acid molecule or mmRNA, is a modified cytidine (e.g., selected from the group consisting of:

[chemical structure]

[chemical structure]

[chemical structure]

[chemical structure]

[chemical structure]

[chemical structure]

or a pharmaceutically acceptable salt or stereoisomer thereof, wherein Y¹, Y³, Y⁴, Y⁶, and r are as described herein (e.g., each r is, independently, an integer from 0 to 5, such as from 0 to 3, from 1 to 3, or from 1 to 5)). For example, the building block molecule, which may be incorporated into a modified nucleic acid molecule or mmRNA, can be:

[chemical structure]

or a pharmaceutically acceptable salt or stereoisomer thereof, wherein each r is, independently, an integer from 0 to 5 (e.g., from 0 to 3, from 1 to 3, or from 1 to 5).

[0136] In some embodiments, the building block molecule, which may be incorporated into a modified nucleic acid molecule or mmRNA, is a modified adenosine (e.g., selected from the group consisting of:

[chemical structure]

[chemical structure]

[chemical structure]

[chemical structure]

[chemical structure]

[chemical structure]

[chemical structure]

or a pharmaceutically acceptable salt or stereoisomer thereof, wherein Y¹, Y³, Y⁴, Y⁶, and r are as described herein (e.g., each r is, independently, an integer from 0 to 5, such as from 0 to 3, from 1 to 3, or from 1 to 5)).

[0137] In some embodiments, the building block molecule, which may be incorporated into a modified nucleic acid molecule or mmRNA, is a modified guanosine (e.g., selected from the group consisting of:

[chemical structure]

[chemical structure]

[chemical structure]

[chemical structure]

[chemical structure]

[chemical structure]

[chemical structure]

or a pharmaceutically acceptable salt or stereoisomer thereof, wherein Y¹, Y³, Y⁴, Y⁶, and r are as described herein (e.g., each r is, independently, an integer from 0 to 5, such as from 0 to 3, from 1 to 3, or from 1 to 5)).

[0138] In some embodiments, the chemical modification can include replacement of C group at C-5 of the ring (e.g., for a pyrimidine nucleoside, such as cytosine or uracil) with N (e.g., replacement of the >CH group at C-5 with >NR^{N1} group, wherein R^{N}1 is H or optionally substituted alkyl). For example, the mmRNA molecule, which may be incorporated into a modified nucleic acid molecule or mmRNA, can be:

[chemical structure]

or a pharmaceutically acceptable salt or stereoisomer thereof, wherein each r is, independently, an integer from 0 to 5 (e.g., from 0 to 3, from 1 to 3, or from 1 to 5).

[0139] In another embodiment, the chemical modification can include replacement of the hydrogen at C-5 of cytosine with halo (e.g., Br, Cl, F, or I) or optionally substituted alkyl (e.g., methyl). For example, the mmRNA molecule, which may be incorporated into a modified nucleic acid or mmRNA, can be:

[chemical structure]

or a pharmaceutically acceptable salt or stereoisomer thereof, wherein each r is, independently, an integer from 0 to 5 (e.g., from 0 to 3, from 1 to 3, or from 1 to 5).

[0140] In yet a further embodiment, the chemical modification can include a fused ring that is formed by the NH₂ at the C-4 position and the carbon atom at the C-5 position. For example, the building block molecule, which may be incorporated into a modified nucleic acid molecule or mmRNA, can be:

[chemical structure]

or a pharmaceutically acceptable salt or stereoisomer thereof, wherein each r is, independently, an integer from 0 to 5 (e.g., from 0 to 3, from 1 to 3, or from 1 to 5).

### Modifications on the Sugar

[0141] The modified nucleosides and nucleotides, which may be incorporated into a nucleic acid (e.g., RNA or mRNA, as described herein) can be modified on the sugar of the ribonucleic acid. For example, the 2′ hydroxyl group (OH) can be modified or replaced with a number of different “oxy” or “deoxy” substituents. Exemplary substitutions at the 2′-position include, but are not limited to, H, halo, optionally substituted C₁₋₆ alkyl; optionally substituted C₁₋₆ alkoxy; optionally substituted C₆₋₁₀ aryloxy; optionally substituted C₃₋₈ cycloalkyl; optionally substituted C₃₋₈ cycloalkoxy; optionally substituted C₆₋₁₀ aryloxy; optionally substituted C₆₋₁₀ aryl-C₁₋₆ alkoxy, optionally substituted C₁₋₁₂ (heterocyclyl)oxy; a sugar (e.g., ribose, pentose, or any described herein); a polyethyleneglycol (PEG), —O(CH₂CH₂O)ₙCH₂CH₂OR, where R is H or optionally substituted alkyl, and n is an integer from 0 to 20 (e.g., from 0 to 4, from 0 to 8, from 0 to 10, from 0 to 16, from 1 to 4, from 1 to 8, from 1 to 10, from 1 to 16, from 1 to 20, from 2 to 4, from 2 to 8, from 2 to 10, from 2 to 16, from 2 to 20, from 4 to 8, from 4 to 10, from 4 to 16, and from 4 to 20); “locked” nucleic acids (LNA) in which the 2′-hydroxyl is connected by a C₁₋₆ alkylene or C₁₋₆ heteroalkylene bridge to the 4′-carbon of the same ribose sugar, where exemplary bridges included methylene, propylene, ether, or amino bridges; aminoalkyl, as defined herein; aminoalkoxy, as defined herein; amino as defined herein; and amino acid, as defined herein.

[0142] Generally, RNA includes the sugar group ribose, which is a 5-membered ring having an oxygen. Exemplary, non-limiting modified nucleotides include replacement of the oxygen in ribose (e.g., with S, Se, or alkylene, such as methylene or ethylene); addition of a double bond (e.g., to replace ribose with cyclopentenyl or cyclohexenyl); ring contraction of ribose (e.g., to form a 4-membered ring of cyclobutane or oxetane); ring expansion of ribose (e.g., to form a 6- or 7-membered ring having an additional carbon or heteroatom, such as for anhydrohexitol, altritol, mannitol, cyclohexanyl, cyclohexenyl, and morpholino that also has a phosphoramidate backbone); multicyclic forms (e.g., tricyclo; and “unlocked” forms, such as glycol nucleic acid (GNA) (e.g., R-GNA or S-GNA, where ribose is replaced by glycol units attached to phosphodiester bonds), threose nucleic acid (TNA, where ribose is replace with α-L-threofuranosyl-(3′→2′)), and peptide nucleic acid (PNA, where 2-amino-ethyl-glycine linkages replace the ribose and phosphodiester backbone). The sugar group can also contain one or more carbons that possess the opposite stereochemical configuration than that of the corresponding carbon in ribose. Thus, a modified nucleic acid molecule or mmRNA can include nucleotides containing, e.g., arabinose, as the sugar.

### Modifications on the Phosphate Backbone

[0143] The modified nucleosides and nucleotides, which may be incorporated into a nucleic acid, e.g., RNA or mRNA, as described herein, can be modified on the phosphate backbone. The phosphate groups of the backbone can be modified by replacing one or more of the oxygen atoms with a different substituent. Further, the modified nucleosides and nucleotides can include the wholesale replacement of an unmodified phosphate moiety with a modified phosphate as described herein. Examples of modified phosphate groups include, but are not limited to, phosphorothioate, phosphoroselenates, borano phosphates, borano phosphate esters, hydrogen phosphonates phosphoroamidates, alkyl or aryl phosphonates and phosphotriesters. Phosphorodithioates have both non-linking oxygens replaced by sulfur. The phosphate linker can also be modified by the replacement of a linking oxygen with nitrogen (bridged phosphoroamidates), sulfur (bridged phosphorothioates) and carbon (bridged methylene-phosphonates).

### Modifications on the Nucleobase

[0144] The present disclosure provides for modified nucleosides and nucleotides. As described herein “nucleoside” is defined as a compound containing a five-carbon sugar molecule (a pentose or ribose) or derivative thereof, and an organic base, purine or pyrimidine, or a derivative thereof. As described herein, “nucleotide” is defined as a nucleoside consisting of a phosphate group. The modified nucleotides (e.g., modified mRNA) may by synthesized by any useful method, as described herein (e.g., chemically, enzymatically, or recombinantly to include one or more modified or non-natural nucleosides).

[0145] The modified nucleotide base pairing encompasses not only the standard adenosine-thymine, adenosine-uracil, or guanosine-cytosine base pairs, but also base pairs formed between nucleotides and/or modified nucleotides comprising non-standard or modified bases, wherein the arrangement of hydrogen bond donors and hydrogen bond acceptors permits hydrogen bonding between a non-standard base and a standard base or between two complementary non-standard base structures. One example of such non-standard base pairing is the base pairing between the modified nucleotide inosine and adenine, cytosine or uracil.

[0146] The modified nucleosides and nucleotides, which may be incorporated into a nucleic acid, e.g., RNA or mRNA, as described herein, can be modified on the nucleobase. Examples of nucleobases found in RNA include, but are not limited to, adenine, guanine, cytosine and uracil. Examples of nucleobases found in DNA include, but are not limited to, adenine, guanine, cytosine and thymine. These nucleobases can be modified or wholly replaced to provide nucleic acids having enhanced properties, e.g. resistance to nucleases through disruption of the binding of a major groove binding partner.

[0147] Table 1 below identifies the chemical faces of each canonical nucleotide. Circles identify the atoms comprising the respective chemical regions.

TABLE 1

| | | |
|---|---|---|
| | | Watson-Crick |
| Major Groove | Minor Groove | Base-pairing |
| Face | Face | Face |

Pyrimidines

| | | | |
|---|---|---|---|
| Cytidine: | [chemical structure] | [chemical structure] | [chemical structure] |
| Uridine: | [chemical structure] | [chemical structure] | [chemical structure] |

Purines

| | | | |
|---|---|---|---|
| Adenosine: | [chemical structure] | [chemical structure] | [chemical structure] |
| Guanosine: | [chemical structure] | [chemical structure] | [chemical structure] |

[0148] In some embodiments, B is a modified uracil. Exemplary modified uracils include those having Formula (b1)-(b5):

[chemical structure]

or a pharmaceutically acceptable salt or stereoisomer thereof, wherein [symbol]
is a single or double bond;

[0149] each of T^{1′}, T^{1″}, T^{2′}, and T^{2″} is, independently, H, optionally substituted alkyl, optionally substituted alkoxy, or optionally substituted thioalkoxy, or the combination of T^{1′} and T^{1″} or the combination of T^{2′} and T^{2″} join together (e.g., as in T²) to form O (oxo), S (thio), or Se (seleno);

[0150] each of V¹ and V² is, independently, O, S, N(R^{Vb})ₙᵥ, or C(R^{Vb})ₙᵥ, wherein nv is an integer from 0 to 2 and each R^{Vb} is, independently, H, halo, optionally substituted amino acid, optionally substituted alkyl, optionally substituted haloalkyl, optionally substituted alkenyl, optionally substituted alkynyl, optionally substituted alkoxy, optionally substituted alkenyloxy, optionally substituted alkynyloxy, optionally substituted hydroxyalkyl, optionally substituted hydroxyalkenyl, optionally substituted hydroxyalkynyl, optionally substituted aminoalkyl (e.g., substituted with an N-protecting group, such as any described herein, e.g., trifluoroacetyl), optionally substituted aminoalkenyl, optionally substituted aminoalkynyl, optionally substituted acylaminoalkyl (e.g., substituted with an N-protecting group, such as any described herein, e.g., trifluoroacetyl), optionally substituted alkoxycarbonylalkyl, optionally substituted alkoxycarbonylalkenyl, optionally substituted alkoxycarbonylalkynyl, or optionally substituted alkoxycarbonylalkoxy (e.g., optionally substituted with any substituent described herein, such as those selected from (1)-(21) for alkyl);

[0151] R¹⁰ is H, halo, optionally substituted amino acid, hydroxy, optionally substituted alkyl, optionally substituted alkenyl, optionally substituted alkynyl, optionally substituted aminoalkyl, optionally substituted hydroxyalkyl, optionally substituted hydroxyalkenyl, optionally substituted hydroxyalkynyl, optionally substituted aminoalkenyl, optionally substituted aminoalkynyl, optionally substituted alkoxy, optionally substituted alkoxycarbonylalkyl, optionally substituted alkoxycarbonylalkenyl, optionally substituted alkoxycarbonylalkynyl, optionally substituted alkoxycarbonylalkoxy, optionally substituted carboxyalkoxy, optionally substituted carboxyalkyl, or optionally substituted carbamoylalkyl;

[0152] R¹¹ is H or optionally substituted alkyl;

[0153] R^{12a} is H, optionally substituted alkyl, optionally substituted hydroxyalkyl, optionally substituted hydroxyalkenyl, optionally substituted hydroxyalkynyl, optionally substituted aminoalkyl, optionally substituted aminoalkenyl, or optionally substituted aminoalkynyl, optionally substituted carboxyalkyl (e.g., optionally substituted with hydroxy), optionally substituted carboxyalkoxy, optionally substituted carboxyaminoalkyl, or optionally substituted carbamoylalkyl; and

[0154] R^{12c} is H, halo, optionally substituted alkyl, optionally substituted alkoxy, optionally substituted thioalkoxy, optionally substituted amino, optionally substituted hydroxyalkyl, optionally substituted hydroxyalkenyl, optionally substituted hydroxyalkynyl, optionally substituted aminoalkyl, optionally substituted aminoalkenyl, or optionally substituted aminoalkynyl.

[0155] Other exemplary modified uracils include those having Formula (b6)-(b9):

[chemical structure]

or a pharmaceutically acceptable salt or stereoisomer thereof, wherein [symbol]
is a single or double bond;

[0156] each of T^{1′}, T^{1″}, T^{2′}, and T^{2″} is, independently, H, optionally substituted alkyl, optionally substituted alkoxy, or optionally substituted thioalkoxy, or the combination of T^{1′} and T^{1″} join together (e.g., as in T¹) or the combination of T^{2′} and T^{2″} join together (e.g., as in T²) to form O (oxo), S (thio), or Se (seleno), or each T¹ and T² is, independently, O (oxo), S (thio), or Se (seleno);

[0157] each of W¹ and W² is, independently, N(R^{Wa})_{nw} or C(R^{Wa})_{nw}, wherein nw is an integer from 0 to 2 and each R^{Wa} is, independently, H, optionally substituted alkyl, or optionally substituted alkoxy;

[0158] each V³ is, independently, O, S, N(R^{Va})ₙᵥ, or C(R^{Va})ₙᵥ, wherein nv is an integer from 0 to 2 and each R^{Va}is, independently, H, halo, optionally substituted amino acid, optionally substituted alkyl, optionally substituted hydroxyalkyl, optionally substituted hydroxyalkenyl, optionally substituted hydroxyalkynyl, optionally substituted alkenyl, optionally substituted alkynyl, optionally substituted heterocyclyl, optionally substituted alkheterocyclyl, optionally substituted alkoxy, optionally substituted alkenyloxy, or optionally substituted alkynyloxy, optionally substituted aminoalkyl (e.g., substituted with an N-protecting group, such as any described herein, e.g., trifluoroacetyl, or sulfoalkyl), optionally substituted aminoalkenyl, optionally substituted aminoalkynyl, optionally substituted acylaminoalkyl (e.g., substituted with an N-protecting group, such as any described herein, e.g., trifluoroacetyl), optionally substituted alkoxycarbonylalkyl, optionally substituted alkoxycarbonylalkenyl, optionally substituted alkoxycarbonylalkynyl, optionally substituted alkoxycarbonylacyl, optionally substituted alkoxycarbonylalkoxy, optionally substituted carboxyalkyl (e.g., optionally substituted with hydroxy and/or an O-protecting group), optionally substituted carboxyalkoxy, optionally substituted carboxyaminoalkyl, or optionally substituted carbamoylalkyl (e.g., optionally substituted with any substituent described herein, such as those selected from (1)-(21) for alkyl), and wherein R^{Va} and R^{12c} taken together with the carbon atoms to which they are attached can form optionally substituted cycloalkyl, optionally substituted aryl, or optionally substituted heterocyclyl (e.g., a 5- or 6-membered ring);

[0159] R^{12a} is H, optionally substituted alkyl, optionally substituted hydroxyalkyl, optionally substituted hydroxyalkenyl, optionally substituted hydroxyalkynyl, optionally substituted aminoalkyl, optionally substituted aminoalkenyl, optionally substituted aminoalkynyl, optionally substituted carboxyalkyl (e.g., optionally substituted with hydroxy and/or an O-protecting group), optionally substituted carboxyalkoxy, optionally substituted carboxyaminoalkyl, optionally substituted carbamoylalkyl, or absent;

[0160] R^{12b} is H, optionally substituted alkyl, optionally substituted alkenyl, optionally substituted alkynyl, optionally substituted hydroxyalkyl, optionally substituted hydroxyalkenyl, optionally substituted hydroxyalkynyl, optionally substituted aminoalkyl, optionally substituted aminoalkenyl, optionally substituted aminoalkynyl, optionally substituted alkaryl, optionally substituted heterocyclyl, optionally substituted alkheterocyclyl, optionally substituted amino acid, optionally substituted alkoxycarbonylacyl, optionally substituted alkoxycarbonylalkoxy, optionally substituted alkoxycarbonylalkyl, optionally substituted alkoxycarbonylalkenyl, optionally substituted alkoxycarbonylalkynyl, optionally substituted alkoxycarbonylalkoxy, optionally substituted carboxyalkyl (e.g., optionally substituted with hydroxy and/or an O-protecting group), optionally substituted carboxyalkoxy, optionally substituted carboxyaminoalkyl, or optionally substituted carbamoylalkyl,

[0161] wherein the combination of R^{12b} and T^{1′} or the combination of R^{12b} and R^{12c} can join together to form optionally substituted heterocyclyl; and

[0162] R^{12c} is H, halo, optionally substituted alkyl, optionally substituted alkoxy, optionally substituted thioalkoxy, optionally substituted amino, optionally substituted aminoalkyl, optionally substituted aminoalkenyl, or optionally substituted aminoalkynyl.

[0163] Further exemplary modified uracils include those having Formula (b28)-(b31):

[chemical structure]

or a pharmaceutically acceptable salt or stereoisomer thereof, wherein

[0164] each of T¹ and T² is, independently, O (oxo), S (thio), or Se (seleno);

[0165] each R^{Vb′} and R^{Vb″} is, independently, H, halo, optionally substituted amino acid, optionally substituted alkyl, optionally substituted haloalkyl, optionally substituted hydroxyalkyl, optionally substituted hydroxyalkenyl, optionally substituted hydroxyalkynyl, optionally substituted alkenyl, optionally substituted alkynyl, optionally substituted alkoxy, optionally substituted alkenyloxy, optionally substituted alkynyloxy, optionally substituted aminoalkyl (e.g., substituted with an N-protecting group, such as any described herein, e.g., trifluoroacetyl, or sulfoalkyl), optionally substituted aminoalkenyl, optionally substituted aminoalkynyl, optionally substituted acylaminoalkyl (e.g., substituted with an N-protecting group, such as any described herein, e.g., trifluoroacetyl), optionally substituted alkoxycarbonylalkyl, optionally substituted alkoxycarbonylalkenyl, optionally substituted alkoxycarbonylalkynyl, optionally substituted alkoxycarbonylacyl, optionally substituted alkoxycarbonylalkoxy, optionally substituted carboxyalkyl (e.g., optionally substituted with hydroxy and/or an O-protecting group), optionally substituted carboxyalkoxy, optionally substituted carboxyaminoalkyl, or optionally substituted carbamoylalkyl (e.g., optionally substituted with any substituent described herein, such as those selected from (1)-(21) for alkyl) (e.g., R^{Vb′} is optionally substituted alkyl, optionally substituted alkenyl, or optionally substituted aminoalkyl, e.g., substituted with an N-protecting group, such as any described herein, e.g., trifluoroacetyl, or sulfoalkyl);

[0166] R^{12a} is H, optionally substituted alkyl, optionally substituted carboxyaminoalkyl, optionally substituted aminoalkyl (e.g., e.g., substituted with an N-protecting group, such as any described herein, e.g., trifluoroacetyl, or sulfoalkyl), optionally substituted aminoalkenyl, or optionally substituted aminoalkynyl; and

[0167] R^{12b} is H, optionally substituted alkyl, optionally substituted alkenyl, optionally substituted alkynyl, optionally substituted hydroxyalkyl, optionally substituted hydroxyalkenyl, optionally substituted hydroxyalkynyl, optionally substituted aminoalkyl, optionally substituted aminoalkenyl, optionally substituted aminoalkynyl (e.g., e.g., substituted with an N-protecting group, such as any described herein, e.g., trifluoroacetyl, or sulfoalkyl),

[0168] optionally substituted alkoxycarbonylacyl, optionally substituted alkoxycarbonylalkoxy, optionally substituted alkoxycarbonylalkyl, optionally substituted alkoxycarbonylalkenyl, optionally substituted alkoxycarbonylalkynyl, optionally substituted alkoxycarbonylalkoxy, optionally substituted carboxyalkoxy, optionally substituted carboxyalkyl, or optionally substituted carbamoylalkyl.

[0169] In particular embodiments, T¹ is O (oxo), and T² is S (thio) or Se (seleno). In other embodiments, T¹ is S (thio), and T² is O (oxo) or Se (seleno). In some embodiments, R^{Vb′} is H, optionally substituted alkyl, or optionally substituted alkoxy.

[0170] In other embodiments, each R^{12a} and R^{12b} is, independently, H, optionally substituted alkyl, optionally substituted alkenyl, optionally substituted alkynyl, or optionally substituted hydroxyalkyl. In particular embodiments, R^{12a} is H. In other embodiments, both R^{12a} and R^{12b} are H.

[0171] In some embodiments, each R^{Vb′} of R^{12b} is, independently, optionally substituted aminoalkyl (e.g., substituted with an N-protecting group, such as any described herein, e.g., trifluoroacetyl, or sulfoalkyl), optionally substituted aminoalkenyl, optionally substituted aminoalkynyl, or optionally substituted acylaminoalkyl (e.g., substituted with an N-protecting group, such as any described herein, e.g., trifluoroacetyl). In some embodiments, the amino and/or alkyl of the optionally substituted aminoalkyl is substituted with one or more of optionally substituted alkyl, optionally substituted alkenyl, optionally substituted sulfoalkyl, optionally substituted carboxy (e.g., substituted with an O-protecting group), optionally substituted hydroxy (e.g., substituted with an O-protecting group), optionally substituted carboxyalkyl (e.g., substituted with an O-protecting group), optionally substituted alkoxycarbonylalkyl (e.g., substituted with an O-protecting group), or N-protecting group. In some embodiments, optionally substituted aminoalkyl is substituted with an optionally substituted sulfoalkyl or optionally substituted alkenyl. In particular embodiments, R^{12a} and R^{Vb″} are both H. In particular embodiments, T¹ is O (oxo), and T² is S (thio) or Se (seleno).

[0172] In some embodiments, R^{Vb′} is optionally substituted alkoxycarbonylalkyl or optionally substituted carbamoylalkyl.

[0173] In particular embodiments, the optional substituent for R^{12a}, R^{12b}, R^{12c}, or R^{Va} is a polyethylene glycol group (e.g., —(CH₂)ₛ₂(OCH₂CH₂)ₛ₁(CH₂)ₛ₃OR′, wherein s1 is an integer from 1 to 10 (e.g., from 1 to 6 or from 1 to 4), each of s2 and s3, independently, is an integer from 0 to 10 (e.g., from 0 to 4, from 0 to 6, from 1 to 4, from 1 to 6, or from 1 to 10), and R′ is H or C₁₋₂₀ alkyl); or an amino-polyethylene glycol group (e.g., —NR^{N1}(CH₂)ₛ₂(CH₂CH₂O)ₛ₁(CH₂)ₛ₃NR^{N1}, wherein s1 is an integer from 1 to 10 (e.g., from 1 to 6 or from 1 to 4), each of s2 and s3, independently, is an integer from 0 to 10 (e.g., from 0 to 4, from 0 to 6, from 1 to 4, from 1 to 6, or from 1 to 10), and each R^{N1} is, independently, hydrogen or optionally substituted C₁₋₆ alkyl).

[0174] In some embodiments, B is a modified cytosine. Exemplary modified cytosines include compounds (b10)-(b14):

[chemical structure]

or a pharmaceutically acceptable salt or stereoisomer thereof, wherein

[0175] each of T^{3′} and T^{3″} is, independently, H, optionally substituted alkyl, optionally substituted alkoxy, or optionally substituted thioalkoxy, or the combination of T^{3′} and T^{3″} join together (e.g., as in T³) to form O (oxo), S (thio), or Se (seleno);

[0176] each V⁴ is, independently, O, S, N(R^{Vc})ₙᵥ, or C(R^{Vc})ₙᵥ, wherein nv is an integer from 0 to 2 and each R^{Vc} is, independently, H, halo, optionally substituted amino acid, optionally substituted alkyl, optionally substituted alkenyl, optionally substituted alkynyl, optionally substituted alkoxy, optionally substituted alkenyloxy, optionally substituted heterocyclyl, optionally substituted alkheterocyclyl, or optionally substituted alkynyloxy (e.g., optionally substituted with any substituent described herein, such as those selected from (1)-(21) for alkyl), wherein the combination of R^{13b} and R^{Vc} can be taken together to form optionally substituted heterocyclyl;

[0177] each V⁵ is, independently, N(R^{Vd})ₙᵥ, or C(R^{Vd})ₙᵥ, wherein nv is an integer from 0 to 2 and each R^{Vd} is, independently, H, halo, optionally substituted amino acid, optionally substituted alkyl, optionally substituted alkenyl, optionally substituted alkynyl, optionally substituted alkoxy, optionally substituted alkenyloxy, optionally substituted heterocyclyl, optionally substituted alkheterocyclyl, or optionally substituted alkynyloxy (e.g., optionally substituted with any substituent described herein, such as those selected from (1)-(21) for alkyl) (e.g., V⁵ is —CH or N);

[0178] each of R^{13a} and R^{13b} is, independently, H, optionally substituted acyl, optionally substituted acyloxyalkyl, optionally substituted alkyl, or optionally substituted alkoxy, wherein the combination of R^{13b} and R¹⁴ can be taken together to form optionally substituted heterocyclyl;

[0179] each R¹⁴ is, independently, H, halo, hydroxy, thiol, optionally substituted acyl, optionally substituted amino acid, optionally substituted alkyl, optionally substituted haloalkyl, optionally substituted alkenyl, optionally substituted alkynyl, optionally substituted hydroxyalkyl (e.g., substituted with an O-protecting group), optionally substituted hydroxyalkenyl, optionally substituted hydroxyalkynyl, optionally substituted alkoxy, optionally substituted alkenyloxy, optionally substituted alkynyloxy, optionally substituted aminoalkoxy, optionally substituted alkoxyalkoxy, optionally substituted acyloxyalkyl, optionally substituted amino (e.g., —NHR, wherein R is H, alkyl, aryl, or phosphoryl), azido, optionally substituted aryl, optionally substituted heterocyclyl, optionally substituted alkheterocyclyl, optionally substituted aminoalkyl, optionally substituted aminoalkenyl, or optionally substituted aminoalkyl; and

[0180] each of R¹⁵ and R¹⁶ is, independently, H, optionally substituted alkyl, optionally substituted alkenyl, or optionally substituted alkynyl.

[0181] Further exemplary modified cytosines include those having Formula (b32)-(b35):

[chemical structure]

or a pharmaceutically acceptable salt or stereoisomer thereof, wherein

[0182] each of T¹ and T³ is, independently, O (oxo), S (thio), or Se (seleno);

[0183] each of R^{13a} and R^{13b} is, independently, H, optionally substituted acyl, optionally substituted acyloxyalkyl, optionally substituted alkyl, or optionally substituted alkoxy, wherein the combination of R^{13b} and R¹⁴ can be taken together to form optionally substituted heterocyclyl;

[0184] each R¹⁴ is, independently, H, halo, hydroxy, thiol, optionally substituted acyl, optionally substituted amino acid, optionally substituted alkyl, optionally substituted haloalkyl, optionally substituted alkenyl, optionally substituted alkynyl, optionally substituted hydroxyalkyl (e.g., substituted with an O-protecting group), optionally substituted hydroxyalkenyl, optionally substituted hydroxyalkynyl, optionally substituted alkoxy, optionally substituted alkenyloxy, optionally substituted alkynyloxy, optionally substituted aminoalkoxy, optionally substituted alkoxyalkoxy, optionally substituted acyloxyalkyl, optionally substituted amino (e.g., —NHR, wherein R is H, alkyl, aryl, or phosphoryl), azido, optionally substituted aryl, optionally substituted heterocyclyl, optionally substituted alkheterocyclyl, optionally substituted aminoalkyl (e.g., hydroxyalkyl, alkyl, alkenyl, or alkynyl), optionally substituted aminoalkenyl, or optionally substituted aminoalkynyl; and

[0185] each of R¹⁵ and R¹⁶ is, independently, H, optionally substituted alkyl, optionally substituted alkenyl, or optionally substituted alkynyl (e.g., R¹⁵ is H, and R¹⁶ is H or optionally substituted alkyl).

[0186] In some embodiments, R¹⁵ is H, and R¹⁶ is H or optionally substituted alkyl. In particular embodiments, R¹⁴ is H, acyl, or hydroxyalkyl. In some embodiments, R¹⁴ is halo. In some embodiments, both R¹⁴ and R¹⁵ are H. In some embodiments, both R¹⁵ and R¹⁶ are H. In some embodiments, each of R¹⁴ and R¹⁵ and R¹⁶ is H. In further embodiments, each of R¹³a and R^{13b} is independently, H or optionally substituted alkyl.

[0187] Further non-limiting examples of modified cytosines include compounds of Formula (b36):

[chemical structure]

or a pharmaceutically acceptable salt or stereoisomer thereof, wherein

[0188] each R^{13b} is, independently, H, optionally substituted acyl, optionally substituted acyloxyalkyl, optionally substituted alkyl, or optionally substituted alkoxy, wherein the combination of R^{13b} and R^{14b} can be taken together to form optionally substituted heterocyclyl;

[0189] each R^{14a} and R^{14b} is, independently, H, halo, hydroxy, thiol, optionally substituted acyl, optionally substituted amino acid, optionally substituted alkyl, optionally substituted haloalkyl, optionally substituted alkenyl, optionally substituted alkynyl, optionally substituted hydroxyalkyl (e.g., substituted with an O-protecting group), optionally substituted hydroxyalkenyl, optionally substituted alkoxy, optionally substituted alkenyloxy, optionally substituted alkynyloxy, optionally substituted aminoalkoxy, optionally substituted alkoxyalkoxy, optionally substituted acyloxyalkyl, optionally substituted amino (e.g., —NHR, wherein R is H, alkyl, aryl, phosphoryl, optionally substituted aminoalkyl, or optionally substituted carboxyaminoalkyl), azido, optionally substituted aryl, optionally substituted heterocyclyl, optionally substituted alkheterocyclyl, optionally substituted aminoalkyl, optionally substituted aminoalkenyl, or optionally substituted aminoalkynyl; and

[0190] each of R¹⁵ is, independently, H, optionally substituted alkyl, optionally substituted alkenyl, or optionally substituted alkynyl.

[0191] In particular embodiments, R^{14b} is an optionally substituted amino acid (e.g., optionally substituted lysine). In some embodiments, R^{14a} is H.

[0192] In some embodiments, B is a modified guanine Exemplary modified guanines include compounds of Formula (b15)-(b17):

[chemical structure]

or a pharmaceutically acceptable salt or stereoisomer thereof, wherein

[0193] each of T^{4′}, T^{4″}, T^{5′}, T^{5″}, T^{6′}, and T^{6″} is, independently, H, optionally substituted alkyl, or optionally substituted alkoxy, and wherein the combination of T^{4′} and T^{4″} (e.g., as in T⁴) or the combination of T^{5′} and T^{5″} (e.g., as in T⁵) or the combination of T^{6′} and T^{6″} join together (e.g., as in T⁶) form O (oxo), S (thio), or Se (seleno);

[0194] each of V⁵ and V⁶ is, independently, O, S, N(R^{Vd})ₙᵥ, or C(R^{Vd})ₙᵥ, wherein nv is an integer from 0 to 2 and each R^{Vd} is, independently, H, halo, thiol, optionally substituted amino acid, cyano, amidine, optionally substituted aminoalkyl, optionally substituted aminoalkenyl, optionally substituted aminoalkynyl, optionally substituted alkyl, optionally substituted alkenyl, optionally substituted alkynyl, optionally substituted alkoxy, optionally substituted alkenyloxy, optionally substituted alkynyloxy (e.g., optionally substituted with any substituent described herein, such as those selected from (1)-(21) for alkyl), optionally substituted thioalkoxy, or optionally substituted amino; and

[0195] each of R¹⁷, R¹⁸, R^{19a}, R^{19b}, R²¹, R²², R²³, and R²⁴ is, independently, H, halo, thiol, optionally substituted alkyl, optionally substituted alkenyl, optionally substituted alkynyl, optionally substituted thioalkoxy, optionally substituted amino, or optionally substituted amino acid.

[0196] Exemplary modified guanosines include compounds of Formula (b37)-(b40):

[chemical structure]

or a pharmaceutically acceptable salt or stereoisomer thereof, wherein

[0197] each of T^{4′} is, independently, H, optionally substituted alkyl, or optionally substituted alkoxy, and each T⁴ is, independently, O (oxo), S (thio), or Se (seleno);

[0198] each of R¹⁸, R^{19a}, R^{19b}, and R²¹ is, independently, H, halo, thiol, optionally substituted alkyl, optionally substituted alkenyl, optionally substituted alkynyl, optionally substituted thioalkoxy, optionally substituted amino, or optionally substituted amino acid.

[0199] In some embodiments, R¹⁸ is H or optionally substituted alkyl. In further embodiments, T⁴ is oxo. In some embodiments, each of R¹⁹a and R^{19b} is, independently, H or optionally substituted alkyl.

[0200] In some embodiments, B is a modified adenine. Exemplary modified adenines include compounds of Formula (b18)-(b20):

[chemical structure]

or a pharmaceutically acceptable salt or stereoisomer thereof, wherein

[0201] each V⁷ is, independently, O, S, N(R^{Ve})ₙᵥ, or C(R^{Ve})ₙᵥ, wherein nv is an integer from 0 to 2 and each R^{Ve} is, independently, H, halo, optionally substituted amino acid, optionally substituted alkyl, optionally substituted alkenyl, optionally substituted alkynyl, optionally substituted alkoxy, optionally substituted alkenyloxy, or optionally substituted alkynyloxy (e.g., optionally substituted with any substituent described herein, such as those selected from (1)-(21) for alkyl);

[0202] each R²⁵ is, independently, H, halo, thiol, optionally substituted alkyl, optionally substituted alkenyl, optionally substituted alkynyl, optionally substituted thioalkoxy, or optionally substituted amino;

[0203] each of R^{26a} and R^{26b} is, independently, H, optionally substituted acyl, optionally substituted amino acid, optionally substituted carbamoylalkyl, optionally substituted alkyl, optionally substituted alkenyl, optionally substituted alkynyl, optionally substituted hydroxyalkyl, optionally substituted hydroxyalkenyl, optionally substituted hydroxyalkynyl, optionally substituted alkoxy, or polyethylene glycol group (e.g., —(CH₂)ₛ₂(OCH₂CH₂)ₛ₁(CH₂)ₛ₃OR′, wherein s1 is an integer from 1 to 10 (e.g., from 1 to 6 or from 1 to 4), each of s2 and s3, independently, is an integer from 0 to 10 (e.g., from 0 to 4, from 0 to 6, from 1 to 4, from 1 to 6, or from 1 to 10), and R′ is H or C₁₋₂₀ alkyl); or an amino-polyethylene glycol group (e.g., —NR^{N1}(CH₂)ₛ₂(CH₂CH₂O)ₛ₁(CH₂)ₛ₃NR^{N1}, wherein s1 is an integer from 1 to 10 (e.g., from 1 to 6 or from 1 to 4), each of s2 and s3, independently, is an integer from 0 to 10 (e.g., from 0 to 4, from 0 to 6, from 1 to 4, from 1 to 6, or from 1 to 10), and each R^{N1} is, independently, hydrogen or optionally substituted C₁₋₆ alkyl);

[0204] each R²⁷ is, independently, H, optionally substituted alkyl, optionally substituted alkenyl, optionally substituted alkynyl, optionally substituted alkoxy, optionally substituted thioalkoxy or optionally substituted amino;

[0205] each R²⁸ is, independently, H, optionally substituted alkyl, optionally substituted alkenyl, or optionally substituted alkynyl; and

[0206] each R²⁹ is, independently, H, optionally substituted acyl, optionally substituted amino acid, optionally substituted carbamoylalkyl, optionally substituted alkyl, optionally substituted alkenyl, optionally substituted alkynyl, optionally substituted hydroxyalkyl, optionally substituted hydroxyalkenyl, optionally substituted alkoxy, or optionally substituted amino.

[0207] Exemplary modified adenines include compounds of Formula (b41)-(b43):

[chemical structure]

or a pharmaceutically acceptable salt or stereoisomer thereof, wherein

[0208] each R²⁵ is, independently, H, halo, thiol, optionally substituted alkyl, optionally substituted alkenyl, optionally substituted alkynyl, optionally substituted thioalkoxy, or optionally substituted amino;

[0209] each of R^{26a} and R^{26b} is, independently, H, optionally substituted acyl, optionally substituted amino acid, optionally substituted carbamoylalkyl, optionally substituted alkyl, optionally substituted alkenyl, optionally substituted alkynyl, optionally substituted hydroxyalkyl, optionally substituted hydroxyalkenyl, optionally substituted hydroxyalkynyl, optionally substituted alkoxy, or polyethylene glycol group (e.g., —(CH₂)ₛ₂(OCH₂CH₂)ₛ₁(CH₂)ₛ₃OR′, wherein s1 is an integer from 1 to 10 (e.g., from 1 to 6 or from 1 to 4), each of s2 and s3, independently, is an integer from 0 to 10 (e.g., from 0 to 4, from 0 to 6, from 1 to 4, from 1 to 6, or from 1 to 10), and R′ is H or C₁₋₂₀ alkyl); or an amino-polyethylene glycol group (e.g., —NR^{N1}(CH₂)ₛ₂(CH₂CH₂O)ₛ₁(CH₂)ₛ₃NR^{N1}, wherein s1 is an integer from 1 to 10 (e.g., from 1 to 6 or from 1 to 4), each of s2 and s3, independently, is an integer from 0 to 10 (e.g., from 0 to 4, from 0 to 6, from 1 to 4, from 1 to 6, or from 1 to 10), and each R^{N1} is, independently, hydrogen or optionally substituted C₁₋₆ alkyl); and

[0210] each R²⁷ is, independently, H, optionally substituted alkyl, optionally substituted alkenyl, optionally substituted alkynyl, optionally substituted alkoxy, optionally substituted thioalkoxy, or optionally substituted amino.

[0211] In some embodiments, R^{26a} is H, and R^{26b} is optionally substituted alkyl. In some embodiments, each of R^{26a} and R^{26b} is, independently, optionally substituted alkyl. In particular embodiments, R²⁷ is optionally substituted alkyl, optionally substituted alkoxy, or optionally substituted thioalkoxy. In other embodiments, R²⁵ is optionally substituted alkyl, optionally substituted alkoxy, or optionally substituted thioalkoxy.

[0212] In particular embodiments, the optional substituent for R^{26a}, R^{26b}, or R²⁹ is a polyethylene glycol group (e.g., —(CH₂)ₛ₂(OCH₂CH₂)ₛ₁(CH₂)ₛ₃OR′, wherein s1 is an integer from 1 to 10 (e.g., from 1 to 6 or from 1 to 4), each of s2 and s3, independently, is an integer from 0 to 10 (e.g., from 0 to 4, from 0 to 6, from 1 to 4, from 1 to 6, or from 1 to 10), and R′ is H or C₁₋₂₀ alkyl); or an amino-polyethylene glycol group (e.g., —NR^{N1}(CH₂)ₛ₂(CH₂CH₂O)ₛ₁(CH₂)ₛ₃NR^{N1}, wherein s1 is an integer from 1 to 10 (e.g., from 1 to 6 or from 1 to 4), each of s2 and s3, independently, is an integer from 0 to 10 (e.g., from 0 to 4, from 0 to 6, from 1 to 4, from 1 to 6, or from 1 to 10), and each R^{N1} is, independently, hydrogen or optionally substituted C₁₋₆ alkyl).

[0213] In some embodiments, B may have Formula (b21):

[chemical structure]

wherein X¹² is, independently, O, S, optionally substituted alkylene (e.g., methylene), or optionally substituted heteroalkylene, xa is an integer from 0 to 3, and R^{12a} and T² are as described herein.

[0214] In some embodiments, B may have Formula (b22):

[chemical structure]

wherein R^{10′} is, independently, optionally substituted alkyl, optionally substituted alkenyl, optionally substituted alkynyl, optionally substituted aryl, optionally substituted heterocyclyl, optionally substituted aminoalkyl, optionally substituted aminoalkenyl, optionally substituted aminoalkynyl, optionally substituted alkoxy, optionally substituted alkoxycarbonylalkyl, optionally substituted alkoxycarbonylalkenyl, optionally substituted alkoxycarbonylalkynyl, optionally substituted alkoxycarbonylalkoxy, optionally substituted carboxyalkoxy, optionally substituted carboxyalkyl, or optionally substituted carbamoylalkyl, and R¹¹, R^{12a}, T¹, and T² are as described herein.

[0215] In some embodiments, B may have Formula (b23):

[chemical structure]

[0216] wherein R¹⁰ is optionally substituted heterocyclyl (e.g., optionally substituted furyl, optionally substituted thienyl, or optionally substituted pyrrolyl), optionally substituted aryl (e.g., optionally substituted phenyl or optionally substituted naphthyl), or any substituent described herein (e.g., for R¹⁰); and wherein R¹¹ (e.g., H or any substituent described herein), R^{12a} (e.g., H or any substituent described herein), T¹ (e.g., oxo or any substituent described herein), and T² (e.g., oxo or any substituent described herein) are as described herein.

[0217] In some embodiments, B may have Formula (b24):

[chemical structure]

wherein R^{14′} is, independently, optionally substituted alkyl, optionally substituted alkenyl, optionally substituted alkynyl, optionally substituted aryl, optionally substituted heterocyclyl, optionally substituted alkaryl, optionally substituted alkheterocyclyl, optionally substituted aminoalkyl, optionally substituted aminoalkenyl, optionally substituted aminoalkynyl, optionally substituted alkoxy, optionally substituted alkoxycarbonylalkyl, optionally substituted alkoxycarbonylalkenyl, optionally substituted alkoxycarbonylalkynyl, optionally substituted alkoxycarbonylalkoxy, optionally substituted carboxyalkoxy, optionally substituted carboxyalkyl, or optionally substituted carbamoylalkyl, and R^{13a}, R^{13b}, R¹⁵, and T³ are as described herein.

[0218] In some embodiments, B may have Formula (b25):

[chemical structure]

wherein R^{14′} is optionally substituted heterocyclyl (e.g., optionally substituted furyl, optionally substituted thienyl, or optionally substituted pyrrolyl), optionally substituted aryl (e.g., optionally substituted phenyl or optionally substituted naphthyl), or any substituent described herein (e.g., for R¹⁴ or R^{14′}); and wherein R^{13a} (e.g., H or any substituent described herein), R^{13b} (e.g., H or any substituent described herein), R¹⁵ (e.g., H or any substituent described herein), and T³ (e.g., oxo or any substituent described herein) are as described herein.

[0219] In some embodiments, B is a nucleobase selected from the group consisting of cytosine, guanine, adenine, and uracil. In some embodiments, B may be:

[chemical structure]

[0220] In some embodiments, the modified nucleobase is a modified uracil. Exemplary nucleobases and nucleosides having a modified uracil include pseudouridine (ψ), pyridin-4-one ribonucleoside, 5-aza-uridine, 6-aza-uridine, 2-thio-5-aza-uridine, 2-thio-uridine (s²U), 4-thio-uridine (s⁴U), 4-thio-pseudouridine, 2-thio-pseudouridine, 5-hydroxy-uridine (ho⁵U), 5-aminoallyl-uridine, 5-halo-uridine (e.g., 5-iodo-uridine or 5-bromo-uridine), 3-methyl-uridine (m³U), 5-methoxy-uridine (mo⁵U), uridine 5-oxyacetic acid (cmo⁵U), uridine 5-oxyacetic acid methyl ester (mcmo⁵U), 5-carboxymethyl-uridine (cm⁵U), 1-carboxymethyl-pseudouridine, 5-carboxyhydroxymethyl-uridine (chm⁵U), 5-carboxyhydroxymethyl-uridine methyl ester (mchm⁵U), 5-methoxycarbonylmethyl-uridine (mcm⁵U), 5-methoxycarbonylmethyl-2-thio-uridine (mcm⁵s²U), 5-aminomethyl-2-thio-uridine (nm⁵s²U), 5-methylaminomethyl-uridine (mnm⁵U), 5-methylaminomethyl-2-thio-uridine (mnm⁵s²U), 5-methylaminomethyl-2-seleno-uridine (mnm⁵se²U), 5-carbamoylmethyl-uridine (ncm⁵U), 5-carboxymethylaminomethyl-uridine (cmnm⁵U), 5-carboxymethylaminomethyl-2-thio-uridine (cmnm⁵s²U), 5-propynyl-uridine, 1-propynyl-pseudouridine, 5-taurinomethyl-uridine (ncm⁵U), 1-taurinomethyl-pseudouridine, 5-taurinomethyl-2-thio-uridine (τm⁵s²U), 1-taurinomethyl-4-thio-pseudouridine, 5-methyl-uridine (m⁵U, i.e., having the nucleobase deoxythymine), 1-methyl-pseudouridine (m¹ψ), 5-methyl-2-thio-uridine (m⁵s²U), 1-methyl-4-thio-pseudouridine (m¹s⁴ψ), 4-thio-1-methyl-pseudouridine, 3-methyl-pseudouridine (m³ψ), 2-thio-1-methyl-pseudouridine, 1-methyl-1-deaza-pseudouridine, 2-thio-1-methyl-1-deaza-pseudouridine, dihydrouridine (D), dihydropseudouridine, 5,6-dihydrouridine, 5-methyl-dihydrouridine (m⁵D), 2-thio-dihydrouridine, 2-thio-dihydropseudouridine, 2-methoxy-uridine, 2-methoxy-4-thio-uridine, 4-methoxy-pseudouridine, 4-methoxy-2-thio-pseudouridine, N1-methyl-pseudouridine, 3-(3-amino-3-carboxypropyl)uridine (acp³U), 1-methyl-3-(3-amino-3-carboxypropyl)pseudouridine (acp³ψ), 5-(isopentenylaminomethyl)uridine (inm⁵U), 5-(isopentenylaminomethyl)-2-thio-uridine (inm⁵s²U), α-thio-uridine, 2′-O-methyl-uridine (Um), 5,2′-O-dimethyl-uridine (m⁵Um), 2′-O-methyl-pseudouridine (ψm), 2-thio-2′-O-methyl-uridine (s²Um), 5-methoxycarbonylmethyl-2′-O-methyl-uridine (mcm⁵Um), 5-carbamoylmethyl-2′-O-methyl-uridine (ncm⁵Um), 5-carboxymethylaminomethyl-2′-O-methyl-uridine (cmnm⁵Um), 3,2′-O-dimethyl-uridine (m³Um), 5-(isopentenylaminomethyl)-2′-O-methyl-uridine (inm⁵Um), 1-thio-uridine, deoxythymidine, 2′-F-ara-uridine, 2′-F-uridine, 2′-OH-ara-uridine, 5-(2-carbomethoxyvinyl) uridine, and 5-[3-(1-E-propenylamino)uridine.

[0221] In some embodiments, the modified nucleobase is a modified cytosine. Exemplary nucleobases and nucleosides having a modified cytosine include 5-aza-cytidine, 6-aza-cytidine, pseudoisocytidine, 3-methyl-cytidine (m³C), N4-acetyl-cytidine (ac⁴C), 5-formyl-cytidine (f⁵C), N4-methyl-cytidine (m⁴C), 5-methyl-cytidine (m⁵C), 5-halo-cytidine (e.g., 5-iodo-cytidine), 5-hydroxymethyl-cytidine (hm⁵C), 1-methyl-pseudoisocytidine, pyrrolo-cytidine, pyrrolo-pseudoisocytidine, 2-thio-cytidine (s²C), 2-thio-5-methyl-cytidine, 4-thio-pseudoisocytidine, 4-thio-1-methyl-pseudoisocytidine, 4-thio-1-methyl-1-deaza-pseudoisocytidine, 1-methyl-1-deaza-pseudoisocytidine, zebularine, 5-aza-zebularine, 5-methyl-zebularine, 5-aza-2-thio-zebularine, 2-thio-zebularine, 2-methoxy-cytidine, 2-methoxy-5-methyl-cytidine, 4-methoxy-pseudoisocytidine, 4-methoxy-1-methyl-pseudoisocytidine, lysidine (k₂C), α-thio-cytidine, 2′-O-methyl-cytidine (Cm), 5,2′-O-dimethyl-cytidine (m⁵Cm), N4-acetyl-2′-O-methyl-cytidine (ac⁴Cm), N4,2′-O-dimethyl-cytidine (m⁴Cm), 5-formyl-2′-O-methyl-cytidine (f⁵Cm), N4,N4,2′-O-trimethyl-cytidine (m⁴₂Cm), 1-thio-cytidine, 2′-F-ara-cytidine, 2′-F-cytidine, and 2′-OH-ara-cytidine.

[0222] In some embodiments, the modified nucleobase is a modified adenine. Exemplary nucleobases and nucleosides having a modified adenine include 2-amino-purine, 2,6-diaminopurine, 2-amino-6-halo-purine (e.g., 2-amino-6-chloro-purine), 6-halo-purine (e.g., 6-chloro-purine), 2-amino-6-methyl-purine, 8-azido-adenosine, 7-deaza-adenine, 7-deaza-8-aza-adenine, 7-deaza-2-amino-purine, 7-deaza-8-aza-2-amino-purine, 7-deaza-2,6-diaminopurine, 7-deaza-8-aza-2,6-diaminopurine, 1-methyl-adenosine (m¹A), 2-methyl-adenine (m²A), N6-methyl-adenosine (m⁶A), 2-methylthio-N6-methyl-adenosine (ms² m⁶A), N6-isopentenyl-adenosine (i⁶A), 2-methylthio-N6-isopentenyl-adenosine (ms²i⁶A), N6-(cis-hydroxyisopentenyl)adenosine (io⁶A), 2-methylthio-N6-(cis-hydroxyisopentenyl)adenosine (ms²io⁶A), N6-glycinylcarbamoyl-adenosine (g⁶A), N6-threonylcarbamoyl-adenosine (t⁶A), N6-methyl-N6-threonylcarbamoyl-adenosine (m⁶t⁶A), 2-methylthio-N6-threonylcarbamoyl-adenosine (ms²g⁶A), N6,N6-dimethyl-adenosine (m⁶₂A), N6-hydroxynorvalylcarbamoyl-adenosine (hn⁶A), 2-methylthio-N6-hydroxynorvalylcarbamoyl-adenosine (ms²hn⁶A), N6-acetyl-adenosine (ac⁶A), 7-methyl-adenine, 2-methylthio-adenine, 2-methoxy-adenine, α-thio-adenosine, 2′-O-methyl-adenosine (Am), N6,2′-O-dimethyl-adenosine (m⁶Am), N6,N6,2′-O-trimethyl-adenosine (m⁶₂Am), 1,2′-O-dimethyl-adenosine (m¹Am), 2′-O-ribosyladenosine (phosphate) (Ar(p)), 2-amino-N6-methyl-purine, 1-thio-adenosine, 8-azido-adenosine, 2′-F-ara-adenosine, 2′-F-adenosine, 2′-OH-ara-adenosine, and N6-(19-amino-pentaoxanonadecyl)-adenosine.

[0223] In some embodiments, the modified nucleobase is a modified guanine Exemplary nucleobases and nucleosides having a modified guanine include inosine (I), 1-methyl-inosine (m¹I), wyosine (imG), methylwyosine (mimG), 4-demethyl-wyosine (imG-14), isowyosine (imG2), wybutosine (yW), peroxywybutosine (o₂yW), hydroxywybutosine (OHyW), undermodified hydroxywybutosine (OHyW*), 7-deaza-guanosine, queuosine (Q), epoxyqueuosine (oQ), galactosyl-queuosine (galQ), mannosyl-queuosine (manQ), 7-cyano-7-deaza-guanosine (preQ₀), 7-aminomethyl-7-deaza-guanosine (preQ₁), archaeosine (G⁺), 7-deaza-8-aza-guanosine, 6-thio-guanosine, 6-thio-7-deaza-guanosine, 6-thio-7-deaza-8-aza-guanosine, 7-methyl-guanosine (m⁷G), 6-thio-7-methyl-guanosine, 7-methyl-inosine, 6-methoxy-guanosine, 1-methyl-guanosine (m¹G), N2-methyl-guanosine (m²G), N2,N2-dimethyl-guanosine (m²₂G), N2,7-dimethyl-guanosine (m^{2,7}G), N2,N2,7-dimethyl-guanosine (m^{2,2,7}G), 8-oxo-guanosine, 7-methyl-8-oxo-guanosine, 1-methyl-6-thio-guanosine, N2-methyl-6-thio-guanosine, N2,N2-dimethyl-6-thio-guanosine, α-thio-guanosine, 2′-O-methyl-guanosine (Gm), N2-methyl-2′-O-methyl-guanosine (m²Gm), N2,N2-dimethyl-2′-O-methyl-guanosine (m²₂Gm), 1-methyl-2′-O-methyl-guanosine (m¹Gm), N2,7-dimethyl-2′-O-methyl-guanosine (m^{2,7}Gm), 2′-O-methyl-inosine (Im), 1,2′-O-dimethyl-inosine (m¹Im), 2′-O-ribosylguanosine (phosphate) (Gr(p)), 1-thio-guanosine, 06-methyl-guanosine, 2′-F-ara-guanosine, and 2′-F-guanosine.

[0224] The nucleobase of the nucleotide can be independently selected from a purine, a pyrimidine, a purine or pyrimidine analog. For example, the nucleobase can each be independently selected from adenine, cytosine, guanine, uracil, or hypoxanthine. In another embodiment, the nucleobase can also include, for example, naturally-occurring and synthetic derivatives of a base, including pyrazolo[3,4-d]pyrimidines, 5-methylcytosine (5-me-C), 5-hydroxymethyl cytosine, xanthine, hypoxanthine, 2-aminoadenine, 6-methyl and other alkyl derivatives of adenine and guanine, 2-propyl and other alkyl derivatives of adenine and guanine, 2-thiouracil, 2-thiothymine and 2-thiocytosine, 5-propynyl uracil and cytosine, 6-azo uracil, cytosine and thymine, 5-uracil (pseudouracil), 4-thiouracil, 8-halo (e.g., 8-bromo), 8-amino, 8-thiol, 8-thioalkyl, 8-hydroxyl and other 8-substituted adenines and guanines, 5-halo particularly 5-bromo, 5-trifluoromethyl and other 5-substituted uracils and cytosines, 7-methylguanine and 7-methyladenine, 8-azaguanine and 8-azaadenine, deazaguanine, 7-deazaguanine, 3-deazaguanine, deazaadenine, 7-deazaadenine, 3-deazaadenine, pyrazolo[3,4-d]pyrimidine, imidazo[1,5-a]1,3,5 triazinones, 9-deazapurines, imidazo[4,5-d]pyrazines, thiazolo[4,5-d]pyrimidines, pyrazin-2-ones, 1,2,4-triazine, pyridazine; and 1,3,5 triazine. When the nucleotides are depicted using the shorthand A, G, C, T or U, each letter refers to the representative base and/or derivatives thereof, e.g., A includes adenine or adenine analogs, e.g., 7-deaza adenine).

### Modifications on the Internucleoside Linkage

[0225] The modified nucleosides and nucleotides, which may be incorporated into a modified nucleic acid or mmRNA molecule, can be modified on the internucleoside linkage (e.g., phosphate backbone). The phosphate groups of the backbone can be modified by replacing one or more of the oxygen atoms with a different substituent. Further, the modified nucleosides and nucleotides can include the wholesale replacement of an unmodified phosphate moiety with a modified phosphate as described herein. Examples of modified phosphate groups include, but are not limited to, phosphorothioate, phosphoroselenates, boranophosphates, boranophosphate esters, hydrogen phosphonates, phosphoramidates, phosphorodiamidates, alkyl or aryl phosphonates, and phosphotriesters. Phosphorodithioates have both non-linking oxygens replaced by sulfur. The phosphate linker can also be modified by the replacement of a linking oxygen with nitrogen (bridged phosphoramidates), sulfur (bridged phosphorothioates), and carbon (bridged methylene-phosphonates).

[0226] The α-thio substituted phosphate moiety is provided to confer stability to RNA and DNA polymers through the unnatural phosphorothioate backbone linkages. Phosphorothioate DNA and RNA have increased nuclease resistance and subsequently a longer half-life in a cellular environment. Phosphorothioate linked modified nucleic acids or mmRNA molecules are expected to also reduce the innate immune response through weaker binding/activation of cellular innate immune molecules.

[0227] In specific embodiments, a modified nucleoside is 5′-O-(l-Thiophosphate)-Adenosine, 5′-O-(1-Thiophosphate)-Cytidine, 5′-O-(1-Thiophosphate)-Guanosine, 5′-O-(1-Thiophosphate)-Uridine or 5′-O-(1-Thiophosphate)-Pseudouridine.

[chemical structure]

### Combinations of Modified Sugars, Nucleobases, and Internucleoside Linkages

[0228] The modified nucleic acids and mmRNA of the invention can include a combination of modifications to the sugar, the nucleobase, and/or the internucleoside linkage. These combinations can include any one or more modifications described herein. For examples, any of the nucleotides described herein in Formulas (Ia), (Ia-1)-(Ia-3), (Ib)-(If), (IIa)-(IIp), (IIb-1), (IIb-2), (IIc-1)-(IIc-2), (IIn-1), (IIn-2), (IVa)-(IV1), and (IXa)-(IXr) can be combined with any of the nucleobases described herein (e.g., in Formulas (b1)-(b43) or any other described herein).

Synthesis of Modified Nucleic Acids and mmRNA Molecules

[0229] The modified nucleic acids for use in accordance with the invention may be prepared according to any available technique including, but not limited to chemical synthesis, enzymatic synthesis, which is generally termed in vitro transcription, enzymatic or chemical cleavage of a longer precursor, etc. Methods of synthesizing RNAs are known in the art (see, e.g., Gait, M. J. (ed.) Oligonucleotide synthesis: a practical approach, Oxford [Oxfordshire], Washington, D.C.: IRL Press, 1984; and Herdewijn, P. (ed.) Oligonucleotide synthesis: methods and applications, Methods in Molecular Biology, v. 288 (Clifton, N.J.) Totowa, N.J.: Humana Press, 2005; both of which are incorporated herein by reference).

[0230] The modified nucleic acids disclosed herein can be prepared from readily available starting materials using the following general methods and procedures. It is understood that where typical or preferred process conditions (i.e., reaction temperatures, times, mole ratios of reactants, solvents, pressures, etc.) are given; other process conditions can also be used unless otherwise stated. Optimum reaction conditions may vary with the particular reactants or solvent used, but such conditions can be determined by one skilled in the art by routine optimization procedures.

[0231] The processes described herein can be monitored according to any suitable method known in the art. For example, product formation can be monitored by spectroscopic means, such as nuclear magnetic resonance spectroscopy (e.g., ¹H or ¹³C) infrared spectroscopy, spectrophotometry (e.g., UV-visible), mass spectrometry, or by chromatography such as high performance liquid chromatography (HPLC) or thin layer chromatography.

[0232] Preparation of modified nucleosides and nucleotides can involve the protection and deprotection of various chemical groups. The need for protection and deprotection, and the selection of appropriate protecting groups can be readily determined by one skilled in the art. The chemistry of protecting groups can be found, for example, in Greene, et al., Protective Groups in Organic Synthesis, 2d. Ed., Wiley & Sons, 1991, which is incorporated herein by reference in its entirety.

[0233] The reactions of the processes described herein can be carried out in suitable solvents, which can be readily selected by one of skill in the art of organic synthesis. Suitable solvents can be substantially nonreactive with the starting materials (reactants), the intermediates, or products at the temperatures at which the reactions are carried out, i.e., temperatures which can range from the solvent's freezing temperature to the solvent's boiling temperature. A given reaction can be carried out in one solvent or a mixture of more than one solvent. Depending on the particular reaction step, suitable solvents for a particular reaction step can be selected.

[0234] Resolution of racemic mixtures of modified nucleosides and nucleotides can be carried out by any of numerous methods known in the art. An example method includes fractional recrystallization using a “chiral resolving acid” which is an optically active, salt-forming organic acid. Suitable resolving agents for fractional recrystallization methods are, for example, optically active acids, such as the D and L forms of tartaric acid, diacetyltartaric acid, dibenzoyltartaric acid, mandelic acid, malic acid, lactic acid or the various optically active camphorsulfonic acids. Resolution of racemic mixtures can also be carried out by elution on a column packed with an optically active resolving agent (e.g., dinitrobenzoylphenylglycine). Suitable elution solvent composition can be determined by one skilled in the art.

[0235] Modified nucleic acids can be prepared according to the synthetic methods described in Ogata et al. Journal of Organic Chemistry 74:2585-2588, 2009; Purmal et al. Nucleic Acids Research 22(1): 72-78, 1994; Fukuhara et al. Biochemistry 1(4): 563-568, 1962; and Xu et al. Tetrahedron 48(9): 1729-1740, 1992, each of which are incorporated by reference in their entirety.

[0236] The modified nucleic acids need not be uniformly modified along the entire length of the molecule. Modified nucleic acid molecules need not be uniformly modified along the entire length of the molecule. Different nucleic acid modifications and/or backbone structures may exist at various positions in the nucleic acid. One of ordinary skill in the art will appreciate that the nucleotide analogs or other modification(s) may be located at any position(s) of a nucleic acid such that the function of the nucleic acid is not substantially decreased. A modification may also be a 5′ or 3′ terminal modification. The nucleic acids may contain at a minimum one modified nucleotide and at maximum 100% modified nucleotides, or any intervening percentage, such as at least 5% modified nucleotides, at least 10% modified nucleotides, at least 25% modified nucleotides, at least 50% modified nucleotides, at least 80% modified nucleotides, or at least 90% modified nucleotides. For example, the nucleic acids may contain a modified pyrimidine such as uracil or cytosine. In some embodiments, at least 5%, at least 10%, at least 25%, at least 50%, at least 80%, at least 90% or 100% of the uracil in the nucleic acid may be replaced with a modified uracil. The modified uracil can be replaced by a compound having a single unique structure, or can be replaced by a plurality of compounds having different structures (e.g., 2, 3, 4 or more unique structures). In some embodiments, at least 5%, at least 10%, at least 25%, at least 50%, at least 80%, at least 90% or 100% of the cytosine in the nucleic acid may be replaced with a modified cytosine. The modified cytosine can be replaced by a compound having a single unique structure, or can be replaced by a plurality of compounds having different structures (e.g., 2, 3, 4 or more unique structures).

[0237] Generally, the shortest length of a modified mRNA, herein “mmRNA,” of the present disclosure can be the length of an mRNA sequence that may be sufficient to encode for a dipeptide. In another embodiment, the length of the mRNA sequence may be sufficient to encode for a tripeptide. In another embodiment, the length of an mRNA sequence may be sufficient to encode for a tetrapeptide. In another embodiment, the length of an mRNA sequence may be sufficient to encode for a pentapeptide. In another embodiment, the length of an mRNA sequence may be sufficient to encode for a hexapeptide. In another embodiment, the length of an mRNA sequence may be sufficient to encode for a heptapeptide. In another embodiment, the length of an mRNA sequence may be sufficient to encode for an octapeptide. In another embodiment, the length of an mRNA sequence may be sufficient to encode for a nonapeptide. In another embodiment, the length of an mRNA sequence may be sufficient to encode for a decapeptide.

[0238] Examples of dipeptides that the modified nucleic acid molecule sequences can encode for include, but are not limited to, carnosine and anserine.

[0239] Generally, the length of a modified mRNA of the present invention is greater than 30 nucleotides in length. In another embodiment, the RNA molecule is greater than 35 nucleotides in length. In another embodiment, the length is at least 40 nucleotides. In another embodiment, the length is at least 45 nucleotides. In another embodiment, the length is at least 55 nucleotides. In another embodiment, the length is at least 60 nucleotides. In another embodiment, the length is at least 60 nucleotides. In another embodiment, the length is at least 80 nucleotides. In another embodiment, the length is at least 90 nucleotides. In another embodiment, the length is at least 100 nucleotides. In another embodiment, the length is at least 120 nucleotides. In another embodiment, the length is at least 140 nucleotides. In another embodiment, the length is at least 160 nucleotides. In another embodiment, the length is at least 180 nucleotides. In another embodiment, the length is at least 200 nucleotides. In another embodiment, the length is at least 250 nucleotides. In another embodiment, the length is at least 300 nucleotides. In another embodiment, the length is at least 350 nucleotides. In another embodiment, the length is at least 400 nucleotides. In another embodiment, the length is at least 450 nucleotides. In another embodiment, the length is at least 500 nucleotides. In another embodiment, the length is at least 600 nucleotides. In another embodiment, the length is at least 700 nucleotides. In another embodiment, the length is at least 800 nucleotides. In another embodiment, the length is at least 900 nucleotides. In another embodiment, the length is at least 1000 nucleotides. In another embodiment, the length is at least 1100 nucleotides. In another embodiment, the length is at least 1200 nucleotides. In another embodiment, the length is at least 1300 nucleotides. In another embodiment, the length is at least 1400 nucleotides. In another embodiment, the length is at least 1500 nucleotides. In another embodiment, the length is at least 1600 nucleotides. In another embodiment, the length is at least 1800 nucleotides. In another embodiment, the length is at least 2000 nucleotides. In another embodiment, the length is at least 2500 nucleotides. In another embodiment, the length is at least 3000 nucleotides. In another embodiment, the length is at least 4000 nucleotides. In another embodiment, the length is at least 5000 nucleotides, or greater than 5000 nucleotides. In another embodiment, the length is at least 5000 nucleotides, or greater than 6000 nucleotides. In another embodiment, the length is at least 7000 nucleotides, or greater than 7000 nucleotides. In another embodiment, the length is at least 8000 nucleotides, or greater than 8000 nucleotides. In another embodiment, the length is at least 9000 nucleotides, or greater than 9000 nucleotides. In another embodiment, the length is at least 10,000 nucleotides, or greater than 10,000 nucleotides.

[0240] Different nucleotide modifications and/or backbone structures may exist at various positions in the nucleic acid. One of ordinary skill in the art will appreciate that the nucleotide analogs or other modification(s) may be located at any position(s) of a nucleic acid such that the function of the nucleic acid is not substantially decreased. A modification may also be a 5′ or 3′ terminal modification. The nucleic acids may contain at a minimum one and at maximum 100% modified nucleotides, or any intervening percentage, such as at least 50% modified nucleotides, at least 80% modified nucleotides, or at least 90% modified nucleotides. For example, one or more or all types of nucleotide (e.g., purine or pyrimidine, or any one or more or all of A, G, U, C) may or may not be uniformly modified in a polynucleotide of the invention, or in a given predetermined sequence region thereof. In some embodiments, all nucleotides X in a polynucleotide of the invention (or in a given sequence region thereof) are modified, wherein X may any one of nucleotides A, G, U, C, or any one of the combinations A+G, A+U, A+C, G+U, G+C, U+C, A+G+U, A+G+C, G+U+C or A+G+C

[0241] Different sugar modifications, nucleotide modifications, and/or internucleoside linkages (e.g., backbone structures) may exist at various positions in the modified nucleic acid or mmRNA. One of ordinary skill in the art will appreciate that the nucleotide analogs or other modification(s) may be located at any position(s) of a modified nucleic acid or mmRNA such that the function of the modified nucleic acid or mmRNA is not substantially decreased. A modification may also be a 5′ or 3′ terminal modification. The modified nucleic acid or mmRNA may contain from about 1% to about 100% modified nucleotides, or any intervening percentage (e.g., from 1% to 20%, from 1% to 25%, from 1% to 50%, from 1% to 60%, from 1% to 70%, from 1% to 80%, from 1% to 90%, from 1% to 95%, from 10% to 20%, from 10% to 25%, from 10% to 50%, from 10% to 60%, from 10% to 70%, from 10% to 80%, from 10% to 90%, from 10% to 95%, from 10% to 100%, from 20% to 25%, from 20% to 50%, from 20% to 60%, from 20% to 70%, from 20% to 80%, from 20% to 90%, from 20% to 95%, from 20% to 100%, from 50% to 60%, from 50% to 70%, from 50% to 80%, from 50% to 90%, from 50% to 95%, from 50% to 100%, from 70% to 80%, from 70% to 90%, from 70% to 95%, from 70% to 100%, from 80% to 90%, from 80% to 95%, from 80% to 100%, from 90% to 95%, from 90% to 100%, and from 95% to 100%).

[0242] In some embodiments, the modified nucleic acid or mmRNA includes a modified pyrimidine (e.g., a modified uracil/uridine or modified cytosine/cytidine). In some embodiments, the uracil or uridine in the modified nucleic acid or mmRNA molecule may be replaced with from about 1% to about 100% of a modified uracil or modified uridine (e.g., from 1% to 20%, from 1% to 25%, from 1% to 50%, from 1% to 60%, from 1% to 70%, from 1% to 80%, from 1% to 90%, from 1% to 95%, from 10% to 20%, from 10% to 25%, from 10% to 50%, from 10% to 60%, from 10% to 70%, from 10% to 80%, from 10% to 90%, from 10% to 95%, from 10% to 100%, from 20% to 25%, from 20% to 50%, from 20% to 60%, from 20% to 70%, from 20% to 80%, from 20% to 90%, from 20% to 95%, from 20% to 100%, from 50% to 60%, from 50% to 70%, from 50% to 80%, from 50% to 90%, from 50% to 95%, from 50% to 100%, from 70% to 80%, from 70% to 90%, from 70% to 95%, from 70% to 100%, from 80% to 90%, from 80% to 95%, from 80% to 100%, from 90% to 95%, from 90% to 100%, and from 95% to 100% of a modified uracil or modified uridine). The modified uracil or uridine can be replaced by a compound having a single unique structure, or can be replaced by a plurality of compounds having different structures (e.g., 2, 3, 4 or more unique structures, as described herein). In some embodiments, the cytosine or cytidine in the modified nucleic acid or mmRNA molecule may be replaced with from about 1% to about 100% of a modified cytosine or modified cytidine (e.g., from 1% to 20%, from 1% to 25%, from 1% to 50%, from 1% to 60%, from 1% to 70%, from 1% to 80%, from 1% to 90%, from 1% to 95%, from 10% to 20%, from 10% to 25%, from 10% to 50%, from 10% to 60%, from 10% to 70%, from 10% to 80%, from 10% to 90%, from 10% to 95%, from 10% to 100%, from 20% to 25%, from 20% to 50%, from 20% to 60%, from 20% to 70%, from 20% to 80%, from 20% to 90%, from 20% to 95%, from 20% to 100%, from 50% to 60%, from 50% to 70%, from 50% to 80%, from 50% to 90%, from 50% to 95%, from 50% to 100%, from 70% to 80%, from 70% to 90%, from 70% to 95%, from 70% to 100%, from 80% to 90%, from 80% to 95%, from 80% to 100%, from 90% to 95%, from 90% to 100%, and from 95% to 100% of a modified cytosine or modified cytidine). The modified cytosine or cytidine can be replaced by a compound having a single unique structure or by a plurality of compounds having different structures (e.g., 2, 3, 4 or more unique structures, as described herein).

[0243] In some embodiments, the present disclosure provides methods of synthesizing a modified nucleic acid or mmRNA including n number of linked nucleosides having Formula (Ia-1):

[chemical structure]

comprising:

[0244] a) reacting a nucleotide of Formula (IV-1):

[chemical structure]

[0245] with a phosphoramidite compound of Formula (V-1):

[chemical structure]

wherein Y⁹ is H, hydroxy, phosphoryl, pyrophosphate, sulfate, amino, thiol, optionally substituted amino acid, or a peptide (e.g., including from 2 to 12 amino acids); and each P¹, P², and P³ is, independently, a suitable protecting group; and [symbol] denotes a solid support;

[0246] to provide a modified nucleic acid or mmRNA of Formula (VI-1):

[chemical structure]

and

[0247] b) oxidizing or sulfurizing the modified nucleic acid or mmRNA of Formula (V) to yield a modified nucleic acid or mmRNA of Formula (VII-1):

[chemical structure]

and

[0248] c) removing the protecting groups to yield the modified nucleic acid or mmRNA of Formula (Ia).

[0249] In some embodiments, steps a) and b) are repeated from 1 to about 10,000 times. In some embodiments, the methods further comprise a nucleotide (e.g., building block molecule) selected from the group consisting of adenosine, cytosine, guanosine, and uracil. In some embodiments, the nucleobase may be a pyrimidine or derivative thereof. In some embodiments, the modified nucleic acid or mmRNA is translatable.

[0250] Other components of modified nucleic acids and mmRNA are optional, and are beneficial in some embodiments. For example, a 5′ untranslated region (UTR) and/or a 3′UTR are provided, wherein either or both may independently contain one or more different nucleoside modifications. In such embodiments, nucleoside modifications may also be present in the translatable region. Also provided are modified nucleic acids and mmRNA containing a Kozak sequence.

[0251] Additionally, provided are nucleic acids containing one or more intronic nucleotide sequences capable of being excised from the nucleic acid.

[0252] Exemplary syntheses of modified nucleotides, which are incorporated into a modified nucleic acid or mmRNA, e.g., RNA or mRNA, are provided below in Scheme 1 through Scheme 11. Scheme 1 provides a general method for phosphorylation of nucleosides, including modified nucleosides.

[chemical structure]

[0253] Various protecting groups may be used to control the reaction. For example, Scheme 2 provides the use of multiple protecting and deprotecting steps to promote phosphorylation at the 5′ position of the sugar, rather than the 2′ and 3′ hydroxyl groups.

[chemical structure]

[0254] Modified nucleotides can be synthesized in any useful manner. Schemes 3, 4, and 7 provide exemplary methods for synthesizing modified nucleotides having a modified purine nucleobase; and Schemes 5 and 6 provide exemplary methods for synthesizing modified nucleotides having a modified pseudouridine or pseudoisocytidine, respectively.

[chemical structure]

[chemical structure]

[chemical structure]

[chemical structure]

[chemical structure]

[0255] Schemes 8 and 9 provide exemplary syntheses of modified nucleotides. Scheme 10 provides a non-limiting biocatalytic method for producing nucleotides.

[chemical structure]

[chemical structure]

[chemical structure]

[0256] Scheme 11 provides an exemplary synthesis of a modified uracil, where the N1 position is modified with R^{12b}, as provided elsewhere, and the 5′-position of ribose is phosphorylated. T¹, T², R^{12a}, R^{12b}, and r are as provided herein. This synthesis, as well as optimized versions thereof, can be used to modify other pyrimidine nucleobases and purine nucleobases (see e.g., Formulas (b1)-(b43)) and/or to install one or more phosphate groups (e.g., at the 5′ position of the sugar). This alkylating reaction can also be used to include one or more optionally substituted alkyl group at any reactive group (e.g., amino group) in any nucleobase described herein (e.g., the amino groups in the Watson-Crick base-pairing face for cytosine, uracil, adenine, and guanine).

[chemical structure]

Combinations of Nucleotides in mmRNA

[0257] Further examples of modified nucleotides and modified nucleotide combinations are provided below in Table 2. These combinations of modified nucleotides can be used to form the modified nucleic acids or mmRNA of the invention. Unless otherwise noted, the modified nucleotides may be completely substituted for the natural nucleotides of the modified nucleic acids or mmRNA of the invention. As a non-limiting example, the natural nucleotide uridine may be substituted with a modified nucleoside described herein. In another non-limiting example, the natural nucleotide uridine may be partially substituted (e.g., about 0.1%, 1%, 5%, 10%, 15%, 20%, 25%, 30%, 35%, 40%, 45%, 50%, 55%, 60%, 65%, 70%, 75%, 80%, 85%, 90%, 95% or 99.9%) with at least one of the modified nucleoside disclosed herein.

TABLE 2

| Modified | |
|---|---|
| Nucleotide | Modified Nucleotide Combination |
| α-thio-cytidine | α-thio-cytidine/5-iodo-uridine |
| | α-thio-cytidine/N1-methyl-pseudo-uridine |
| | α-thio-cytidine/α-thio-uridine |
| | α-thio-cytidine/5-methyl-uridine |
| | α-thio-cytidine/pseudo-uridine |
| | about 50% of the cytosines are α-thio-cytidine |
| pseudoisocytidine | pseudoisocytidine/5-iodo-uridine |
| | pseudoisocytidine/N1-methyl-pseudouridine |
| | pseudoisocytidine/α-thio-uridine |
| | pseudoisocytidine/5-methyl-uridine |
| | pseudoisocytidine/pseudouridine |
| | about 25% of cytosines are pseudoisocytidine |
| | pseudoisocytidine/about 50% of uridines are N1- |
| | methyl-pseudouridine and about 50% of uridines |
| | are pseudouridine pseudoisocytidine/about 25% of |
| | uridines are N1-methyl-pseudouridine and about |
| | 25% of uridines are pseudouridine |
| pyrrolo-cytidine | pyrrolo-cytidine/5-iodo-uridine |
| | pyrrolo-cytidine/N1-methyl-pseudouridine |
| | pyrrolo-cytidine/α-thio-uridine |
| | pyrrolo-cytidine/5-methyl-uridine |
| | pyrrolo-cytidine/pseudouridine |
| | about 50% of the cytosines are pyrrolo-cytidine |
| 5-methyl-cytidine | 5-methyl-cytidine/5-iodo-uridine |
| | 5-methyl-cytidine/N1-methyl-pseudouridine |
| | 5-methyl-cytidine/α-thio-uridine |
| | 5-methyl-cytidine/5-methyl-uridine |
| | 5-methyl-cytidine/pseudouridine |
| | about 25% of cytosines are 5-methyl-cytidine |
| | about 50% of cytosines are 5-methyl-cytidine |
| | 5-methyl-cytidine/5-methoxy-uridine |
| | 5-methyl-cytidine/5-bromo-uridine |
| | 5-methyl-cytidine/2-thio-uridine |
| | 5-methyl-cytidine/about 50% of uridines are 2- |
| | thio-uridine about 50% of uridines are 5-methyl- |
| | cytidine/about 50% of uridines are 2-thio-uridine |
| N4-acetyl- | N4-acetyl-cytidine/5-iodo-uridine |
| cytidine | N4-acetyl-cytidine/N1-methyl-pseudouridine |
| | N4-acetyl-cytidine/α-thio-uridine |
| | N4-acetyl-cytidine/5-methyl-uridine |
| | N4-acetyl-cytidine/pseudouridine |
| | about 50% of cytosines are N4-acetyl-cytidine |
| | about 25% of cytosines are N4-acetyl-cytidine |
| | N4-acetyl-cytidine/5-methoxy-uridine |
| | N4-acetyl-cytidine/5-bromo-uridine |
| | N4-acetyl-cytidine/2-thio-uridine |
| | about 50% of cytosines are N4-acetyl-cytidine/ |
| | about 50% of uridines are 2-thio-uridine |

[0258] Further examples of modified nucleotide combinations are provided below in Table 3. These combinations of modified nucleotides can be used to form the modified nucleic acid molecules or mmRNA of the invention.

TABLE 3

| Modified | |
|---|---|
| Nucleotide | Modified Nucleotide Combination |
| modified cytidine | modified cytidine with (b10)/pseudouridine |
| having one or | modified cytidine with (b10)/N1-methyl-pseudouridine |
| more nucleobases | modified cytidine with (b10)/5-methoxy-uridine |
| of Formula (b10) | modified cytidine with (b10)/5-methyl-uridine |
| | modified cytidine with (b10)/5-bromo-uridine |
| | modified cytidine with (b10)/2-thio-uridine |
| | about 50% of cytidine substituted with modified |
| | cytidine (b10)/about 50% of uridines are 2-thio-uridine |
| modified cytidine | modified cytidine with (b32)/pseudouridine |
| having one or | modified cytidine with (b32)/N1-methyl-pseudouridine |
| more nucleobases | modified cytidine with (b32)/5-methoxy-uridine |
| of Formula (b32) | modified cytidine with (b32)/5-methyl-uridine |
| | modified cytidine with (b32)/5-bromo-uridine |
| | modified cytidine with (b32)/2-thio-uridine |
| | about 50% of cytidine substituted with modified |
| | 5 cytidine (b32)/about 0% of uridines are |
| | 2-thio-uridine |
| modified uridine | modified uridine with (b1)/N4-acetyl-cytidine |
| having one or | modified uridine with (b1)/5-methyl-cytidine |
| more nucleobases | |
| of Formula (b1) | |
| modified uridine | modified uridine with (b8)/N4-acetyl-cytidine |
| having one or | modified uridine with (b8)/5-methyl-cytidine |
| more nucleobases | |
| of Formula (b8) | |
| modified uridine | modified uridine with (b28)/N4-acetyl-cytidine |
| having one or | modified uridine with (b28)/5-methyl-cytidine |
| more nucleobases | |
| of Formula (b28) | |
| modified uridine | modified uridine with (b29)/N4-acetyl-cytidine |
| having one or | modified uridine with (b29)/5-methyl-cytidine |
| more nucleobases | |
| of Formula (b29) | |
| modified uridine | modified uridine with (b30)/N4-acetyl-cytidine |
| having one or | modified uridine with (b30)/5-methyl-cytidine |
| more nucleobases | |
| of Formula (b30) | |

[0259] In some embodiments, at least 25% of the cytosines are replaced by a compound of Formula (b10)-(b14) (e.g., at least about 30%, at least about 35%, at least about 40%, at least about 45%, at least about 50%, at least about 55%, at least about 60%, at least about 65%, at least about 70%, at least about 75%, at least about 80%, at least about 85%, at least about 90%, at least about 95%, or about 100%).

[0260] In some embodiments, at least 25% of the uracils are replaced by a compound of Formula (b1)-(b9) (e.g., at least about 30%, at least about 35%, at least about 40%, at least about 45%, at least about 50%, at least about 55%, at least about 60%, at least about 65%, at least about 70%, at least about 75%, at least about 80%, at least about 85%, at least about 90%, at least about 95%, or about 100%).

[0261] In some embodiments, at least 25% of the cytosines are replaced by a compound of Formula (b10)-(b14), and at least 25% of the uracils are replaced by a compound of Formula (b1)-(b9) (e.g., at least about 30%, at least about 35%, at least about 40%, at least about 45%, at least about 50%, at least about 55%, at least about 60%, at least about 65%, at least about 70%, at least about 75%, at least about 80%, at least about 85%, at least about 90%, at least about 95%, or about 100%).

### Terminal Architecture Modifications: 5′-Capping

[0262] The 5′-cap structure is responsible for binding the mRNA Cap Binding Protein (CBP), which is responsibility for mRNA stability in the cell and translation competency through the association of CBP with poly(A) binding protein to form the mature cyclic mRNA species. The cap further assists the removal of 5′ proximal introns removal during mRNA splicing.

[0263] Endogenous messenger RNA (mRNA) molecules may contain a 5′-cap structure on the 5′-end of a mature mRNA molecule. The 5′-cap contains a 5′-5′-triphosphate linkage between the 5′-most nucleotide and guanine nucleotide. The conjugated guanine nucleotide may be methylated to generate an N7-methyl-guanylate residue. The ribose sugars of the terminal and/or anteterminal transcribed nucleotides of the 5′ end of the mRNA may optionally also be 2′-O-methylated. 5′-decapping through hydrolysis and cleavage of the guanylate cap structure may target a nucleic acid molecule, such as an mRNA molecule, for degradation.

[0264] Modifications to the modified mRNA of the present invention may generate a non-hydrolyzable cap structure preventing decapping and thus increasing mRNA half-life. Because cap structure hydrolysis requires cleavage of 5′-ppp-5′ phosphorodiester linkages, modified nucleotides may be used during the capping reaction. For example, a Vaccinia Capping Enzyme from New England Biolabs (Ipswich, Mass.) may be used with α-thio-guanosine nucleotides according to the manufacturer's instructions to create a phosphorothioate linkage in the 5′-ppp-5′ cap. Additional modified guanosine nucleotides may be used such as α-methyl-phosphonate and seleno-phosphate nucleotides.

[0265] Additional modifications include, but are not limited to, 2′-O-methylation of the ribose sugars of 5′-terminal and/or 5′-anteterminal nucleotides of the mRNA (as mentioned above) on the 2′-hydroxyl group of the sugar ring. Multiple distinct 5′-cap structures can be used to generate the 5′-cap of a synthetic mRNA molecule.

[0266] Cap analogs, which herein are also referred to as synthetic cap analogs, chemical caps, chemical cap analogs, or structural or functional cap analogs, differ from natural (i.e. endogenous, wild-type or physiological) 5′-caps in their chemical structure, while retaining cap function. Cap analogs may be chemically (i.e. non-enzymatically) or enzymatically synthesized and/or linked to a nucleic acid molecule. Many chemical cap analogs are used to co-transcriptionally cap a synthetic mRNA molecule.

[0267] For example, the Anti-Reverse Cap Analog (ARCA) cap contains a 5′-5′-triphosphate guanine-guanine linkage where one guanine contains an N7 methyl group as well as a 3′-O-methyl group (i.e., N7,3′-O-dimethyl-guanosine-5′-triphosphate-5′-guanosine (m⁷G-3′mppp-G; which may equivalently be designated 3′ O-Me-m7G(5′)ppp(5′)G)). The 3′-O atom of the other, unmodified, guanine becomes linked to the 5′-terminal nucleotide of the capped nucleic acid molecule (e.g. an mRNA or mmRNA). The N7- and 3′-O-methlyated guanine provides the terminal moiety of the capped nucleic acid molecule (e.g. mRNA or mmRNA).

[0268] Another exemplary cap is mCAP, which is similar to ARCA but has a 2′-O-methyl group on guanosine (i.e., N7,2′-O-dimethyl-guanosine-5′-triphosphate-5′-guanosine, m⁷Gm-ppp-G).

[0269] While cap analogs allow for the concomitant capping of a nucleic acid molecule in an in vitro transcription reaction, up to 20% of transcripts can remain uncapped. This, as well as the structural differences of a cap analog from an endogenous 5′-cap structures of nucleic acids produced by the endogenous, cellular transcription machinery, may lead to reduced translational competency and reduced cellular stability.

[0270] Modified mRNA of the present invention may also be capped post-transcriptionally, using enzymes, in order to generate more authentic 5′-cap structures. As used herein, the phrase “more authentic” refers to a feature that closely mirrors or mimics, either structurally or functionally, an endogenous or wild type feature. That is, a “more authentic” feature is better representative of an endogenous, wild-type, natural or physiological cellular function and/or structure as compared to synthetic features or analogs, etc., of the prior art, or which outperforms the corresponding endogenous, wild-type, natural or physiological feature in one or more respects. Non-limiting examples of more authentic 5′cap structures of the present invention are those which, among other things, have enhanced binding of cap binding proteins, increased half life, reduced susceptibility to 5′ endonucleases and/or reduced 5′decapping, as compared to synthetic 5′cap structures known in the art (or to a wild-type, natural or physiological 5′cap structure). For example, recombinant Vaccinia Virus Capping Enzyme and recombinant 2′-O-methyltransferase enzyme can create a canonical 5′-5′-triphosphate linkage between the 5′-terminal nucleotide of an mRNA and a guanine cap nucleotide wherein the cap guanine contains an N7 methylation and the 5′-terminal nucleotide of the mRNA contains a 2′-O-methyl. Such a structure is termed the Cap1 structure. This cap results in a higher translational-competency and cellular stability and a reduced activation of cellular pro-inflammatory cytokines, as compared, e.g., to other 5′cap analog structures known in the art. Cap structures include, but are not limited to, 7mG(5′)ppp(5′)N,pN2p (cap 0), 7mG(5′)ppp(5′)N1mpNp (cap 1), and 7mG(5′)-ppp(5′)N1mpN2mp (cap 2).

[0271] Because the modified mRNA may be capped post-transcriptionally, and because this process is more efficient, nearly 100% of the modified mRNA may be capped. This is in contrast to ˜80% when a cap analog is linked to an mRNA in the course of an in vitro transcription reaction.

[0272] According to the present invention, 5′ terminal caps may include endogenous caps or cap analogs. According to the present invention, a 5′ terminal cap may comprise a guanine analog. Useful guanine analogs include, but are not limited to, inosine, N1-methyl-guanosine, 2′fluoro-guanosine, 7-deaza-guanosine, 8-oxo-guanosine, 2-amino-guanosine, LNA-guanosine, and 2-azido-guanosine.

### IRES Sequences

[0273] Further, provided are nucleic acids containing an internal ribosome entry site (IRES). An IRES may act as the sole ribosome binding site, or may serve as one of multiple ribosome binding sites of an mRNA. An mRNA containing more than one functional ribosome binding site may encode several peptides or polypeptides that are translated independently by the ribosomes (“multicistronic mRNA”). When nucleic acids are provided with an IRES, further optionally provided is a second translatable region. Examples of IRES sequences that can be used according to the invention include without limitation, those from picornaviruses (e.g. FMDV), pest viruses (CFFV), polio viruses (PV), encephalomyocarditis viruses (ECMV), foot-and-mouth disease viruses (FMDV), hepatitis C viruses (HCV), classical swine fever viruses (CSFV), murine leukemia virus (MLV), simian immune deficiency viruses (SIV) or cricket paralysis viruses (CrPV).

### Terminal Architecture Modifications: Poly-A Tails

[0274] During RNA processing, a long chain of adenine nucleotides (poly-A tail) is normally added to a messenger RNA (mRNA) molecules to increase the stability of the molecule. Immediately after transcription, the 3′ end of the transcript is cleaved to free a 3′ hydroxyl. Then poly-A polymerase adds a chain of adenine nucleotides to the RNA. The process, called polyadenylation, adds a poly-A tail that is between 100 and 250 residues long.

[0275] It has been discovered that unique poly-A tail lengths provide certain advantages to the modified RNAs of the present invention.

[0276] Generally, the length of a poly-A tail of the present invention is greater than 30 nucleotides in length. In another embodiment, the poly-A tail is greater than 35 nucleotides in length. In another embodiment, the length is at least 40 nucleotides. In another embodiment, the length is at least 45 nucleotides. In another embodiment, the length is at least 55 nucleotides. In another embodiment, the length is at least 60 nucleotides. In another embodiment, the length is at least 60 nucleotides. In another embodiment, the length is at least 80 nucleotides. In another embodiment, the length is at least 90 nucleotides. In another embodiment, the length is at least 100 nucleotides. In another embodiment, the length is at least 120 nucleotides. In another embodiment, the length is at least 140 nucleotides. In another embodiment, the length is at least 160 nucleotides. In another embodiment, the length is at least 180 nucleotides. In another embodiment, the length is at least 200 nucleotides. In another embodiment, the length is at least 250 nucleotides. In another embodiment, the length is at least 300 nucleotides. In another embodiment, the length is at least 350 nucleotides. In another embodiment, the length is at least 400 nucleotides. In another embodiment, the length is at least 450 nucleotides. In another embodiment, the length is at least 500 nucleotides. In another embodiment, the length is at least 600 nucleotides. In another embodiment, the length is at least 700 nucleotides. In another embodiment, the length is at least 800 nucleotides. In another embodiment, the length is at least 900 nucleotides. In another embodiment, the length is at least 1000 nucleotides. In some embodiments, the modified mRNA includes from about 35 to about 3,000 nucleotides (e.g., from 35 to 50, from 35 to 100, from 35 to 250, from 35 to 500, from 30 to 750, from 35 to 1,000, from 35 to 1,500, from 35 to 2,000, from 35 to 2,500, from 50 to 100, from 50 to 250, from 50 to 500, from 50 to 750, from 50 to 1,000, from 50 to 1,500, from 50 to 2,000, from 50 to 2,500, from 50 to 3,000, from 100 to 500, from 100 to 750, from 100 to 1,000, from 100 to 1,500, from 100 to 2,000, from 100 to 2,500, from 100 to 3,000, from 500 to 750, from 500 to 1,000, from 500 to 1,500, from 500 to 2,000, from 500 to 2,500, from 500 to 3,000, from 1,000 to 1,500, from 1,000 to 2,000, from 1,000 to 2,500, from 1,000 to 3,000, from 1,500 to 2,000, from 1,500 to 2,500, from 1,500 to 3,000, from 2,000 to 3,000, from 2,000 to 2,500, and from 2,500 to 3,000).

[0277] In one embodiment, the poly-A tail is designed relative to the length of the overall modified RNA molecule. This design may be based on the length of the coding region of the modified RNA, the length of a particular feature or region of the modified RNA (such as the mRNA), or based on the length of the ultimate product expressed from the modified RNA.

[0278] In this context the poly-A tail may be 10, 20, 30, 40, 50, 60, 70, 80, 90 or 100% greater in length than the modified RNA or feature thereof. The poly-A tail may also be designed as a fraction of the modified RNA to which it belongs. In this context, the poly-A tail may be 10, 20, 30, 40, 50, 60, 70, 80, or 90% or more of the total length of the construct or the total length of the construct minus the poly-A tail. Further, engineered binding sites and conjugation of modified mRNA for Poly-A binding protein may enhance expression.

[0279] Additionally, multiple distinct modified mRNA may be linked together to the PABP (Poly-A binding protein) through the 3′-end using modified nucleotides at the 3′-terminus of the poly-A tail. Transfection experiments can be conducted in relevant cell lines at and protein production can be assayed by ELISA at 12 hour, 24 hour, 48 hour, 72 hour and day 7 post-transfection.

[0280] In one embodiment, the modified mRNA of the present invention are designed to include a polyA-G Quartet. The G-quartet is a cyclic hydrogen bonded array of four guanine nucleotides that can be formed by G-rich sequences in both DNA and RNA. In this embodiment, the G-quartet is incorporated at the end of the poly-A tail. The resultant mmRNA molecule is assayed for stability, protein production and other parameters including half-life at various time points. It has been discovered that the polyA-G quartet results in protein production equivalent to at least 75% of that seen using a poly-A tail of 120 nucleotides alone.

### Use of Modified RNAs

[0281] Improvement in Organ, Tissue, or Explant Viability and/or Longevity

[0282] The present invention addresses a long felt need in the fields of organ rescue and transplant. The insults and damage of newly harvested organs and tissues are often rapid and irreversible. The modified mRNAs as described herein may be used to increase the viability or longevity of an organ or tissue explant, or portion thereof. In this manner, the time between harvest and transplant or harvest and study may be increased, affording more opportunity for long distance transplant matches. For example, organs and tissues may be contacted by soaking or injection or injection to the host, with a modified mRNA which encodes a protein which acts as a radical scavenger. In this manner, the organ would suffer less damage and be viable for a longer time. The modified and/or formulated mRNA itself may also act as a radical scavenger.

[0283] Any organ, tissue or portion thereof (e.g., cells) may be administered the compositions of the present invention. Organs may be selected from the heart, lung, brain, liver, basal ganglia, brain stem medulla, midbrain, pons, cerebellum, cerebral cortex, hypothalamus, eye, pituitary, thyroid, parathyroid, esophagus, thymus, adrenal glands, appendix, bladder, gallbladder, large intestine, small intestine, kidney, pancreas, spleen, stomach, skin, prostate, testes, ovaries, or uterus. Tissues may be selected from any of the organs described herein, connective tissues such as, but not limited to, cartilage (e.g., esophageal cartilage, cartilage of the knee, cartilage of the ear, cartilage of the nose), muscle such as, but not limited to, smooth and cardiac (e.g., heart valves), tendons, ligaments, bone (e.g., bone marrow), cornea, middle ear and veins. Any portion of an organ or tissue may also be administered the compositions of the present invention. As a non-limiting example, a portion of the eye such as the cornea may be administered the compositions of the present invention. As another non-limiting example, hair and/or hair follicles may be administered the compositions of the present invention before, during and/or after transplant of skin and/or hair follicles.

[0284] In one embodiment, the entire organ, tissue or portion thereof is administered the compositions of the present invention before transplant. As a non-limiting example, the entire organ, tissue or portion thereof may be administered the compositions of the present invention comprising modified mRNA prior to transplant. As another non-limiting example, part of the organ, tissue or portion thereof may be administered a first composition of the present invention comprising modified mRNA prior to transplant and the other part of the organ, tissue or portion thereof may be administered a second composition. The first and second composition may comprise the same or different modified mRNA. The first and second composition may comprise more than one modified mRNA.

[0285] In one embodiment, the compositions described herein are administered to more than one organ, tissue or portion thereof.

[0286] In one embodiment, the compositions described herein may be administered to two organs, tissues or portions thereof. As a non-limiting example, a kidney and pancreas or heart and kidney, or heart and liver or lung and kidney or lung and liver, or heart and lung may be treated with the compositions described herein before, during and/or after transplant into a single recipient. Each organ may be administered the same or different composition.

[0287] In one embodiment, the compositions described herein may be administered to three or more organs, tissues or portions thereof. As a non-limiting example, a heart, liver and kidney or heart, kidney and pancreas or heart, lung and liver may be treated with the compositions described herein before, during and/or after transplant into a single recipient. Each organ may be administered the same or different composition.

[0288] In one embodiment the modified RNA composition comprises a formulated modified mRNA and the formulation may be selected from those described herein including lipids, lipidoids, lipidoids, polymers, liposome formulations, nanoparticles, dynamic polyconjugate formulations, atuplexes, DBTC formulations, PLGA polymers, protamine based agents, cell penetrating peptides, conjugates of sugars or steroids, and cell-based carrier systems.

[0289] In one embodiment, the modified mRNA is administered to a host organism. That host organism may be a donor or recipient host. It may be a mammal and that mammal may be a human. It is also contemplated that the compositions would be useful in veterinary applications or any application in which organ viability (e.g., integrity, or longevity) was desired. Donation does not necessarily suggest that there is a recipient organism. Donation (or harvest) of an organ or tissue may be made in the absence of a recipient.

[0290] In one embodiment, administration to the donor organism occurs either prior to any procedure to remove the organ or tissue, during removal or after removal of the organ or tissue. Administration may be made by soaking, contact, injection, or by delivery to the blood of the donor or recipient. Furthermore, administration may be facilitated at least in part by the use of, or in combination with, a medical device, system or component such as an ex-vivo organ care system.

[0291] In another embodiment, the organ, tissue or portion thereof is administered the compositions of the present invention before transplant and the host is administered a composition of the present invention. The composition administered to the host may be the same or different from the composition the organ, tissue or portion thereof was treated with. The composition administered to the host and the composition administered the organ, tissue or portion thereof may comprise more than one modified mRNA.

[0292] In another embodiment, the compositions described herein may be administered to veins (e.g., femoral and sapenous veins) before, during and/or after transplantation.

[0293] In one embodiment, the compositions described herein are injected into the organ, tissue and/or portion thereof prior to, during and/or after removal from the host. The compositions described herein may be administered to the entire organ, a portion of the organ, entire tissue, portion of the tissue, and/or at least one cell to be transplanted.

[0294] In one embodiment, the fluids used during transplant may comprise compositions comprising modified mRNA. For example, the modified mRNA may be added to fluids used in transplant or fluids which the organ, tissues or portion thereof may contact during the transplant process.

[0295] In one embodiment, the modified nucleic acids described herein may be loaded into cells of the tissues and/or organs using electroporation (e.g., flow electroporation). Methyl transferase inhibitors and/or nucleases may be used to improve viability and enhance transgene expression (see e.g., US20060205081, US20070059833, WO2006089152 and WO2007030674; each of which are herein incorporated by reference in its entirety).

[0296] In one embodiment, the composition comprises formulated modified mRNA administered.

[0297] In one embodiment, the modified mRNA encodes a polypeptide which acts as a radical scavenger or an immunosuppressive agent.

[0298] In one embodiment, the modified mRNA may be encapsulated in hydrogels or sealants prior to administration to the organs, tissues and/or portions thereof. The organs, tissues and/or portions thereof may be administered the sealant containing modified mRNA prior to, during and/or after the transplantation procedure. As a non-limiting example, modified mRNA may be formulated in a sealant or hydrogel and then administered to an organ, tissue and/or portion thereof prior to transplantation. As another non-limiting example, modified mRNA encoding a protein such as a polypeptide of interest is formulated in a sealant or hydrogel prior to, during and/or after the transplantation procedure.

[0299] In one embodiment the modified mRNA encodes a protein such as a polypeptide of interest. A polypeptide of interest of the present invention may include, but are not limited to, a protein that is a radical scavenger, a protein that is an immunosuppressive agent, protein a4beta1, vascular cell adhesion molecule 1 (VCAM-1), VEGF, neuregulin1 (NRG1) thymosin beta-4 major histocompatibility complex (MHC), human leukocyte antigens (HLA), heat shock proteins (HSP), b-cell leukemia/lymphoma-2 (BCL-2), nitric oxide synthase (NOS), interleukin-4, interleukin-10, transforming growth factor beta-1 (TGF-β1), heme oxygenzse 1 (HO-1 or HMOX1), killer cell immunoglobin receptor (KIR), natural killer cell (NK), a protein kinase C (PKC) inhibitor and the targets listed in Table 4.

### Target Selection

[0300] According to the present invention, the modified nucleic acids comprise at least a first region of linked nucleosides encoding at least one polypeptide of interest. Non-limiting examples of the polypeptides of interest or “Targets” of the present invention are listed in Table 4. Shown in Table 4, in addition to the description of the gene encoding the polypeptide of interest are the National Center for Biotechnology Information (NCBI) nucleotide reference ID (NM Ref) and the NCBI peptide reference ID (NP Ref). For any particular gene there may exist one or more variants or isoforms. Where these exist, they are shown in the table as well. It will be appreciated by those of skill in the art that disclosed in the Table are potential flanking regions. These are encoded in each nucleotide sequence either to the 5′ (upstream) or 3′ (downstream) of the open reading frame. The open reading frame is definitively and specifically disclosed by teaching the nucleotide reference sequence. Consequently, the sequences taught flanking that encoding the protein are considered flanking regions. It is also possible to further characterize the 5′ and 3′ flanking regions by utilizing one or more available databases or algorithms. Databases have annotated the features contained in the flanking regions of the NCBI sequences and these are available in the art.

TABLE 4
Targets

| | | | SEQ | | SEQ |
|---|---|---|---|---|---|
| Target | | | ID | | ID |
| No. | Description | NM Ref. | NO | NP Ref. | NO |
| 1 | Homo sapiens thymosin beta 4, X- | NM_021109.3 | 1 | NP_066932.1 | 127 |
| | linked (TMSB4X), mRNA | | | | |
| 2 | Homo sapiens thymosin beta 4, Y- | NM_004202.2 | 2 | NP_004193.1 | 128 |
| | linked (TMSB4Y), mRNA | | | | |
| 3 | Homo sapiens neuregulin 1 (NRG1), | NM_001160008.1 | 3 | NP_001153480.1 | 129 |
| | transcript variant HRG-beta2b, | | | | |
| | mRNA | | | | |
| 4 | Homo sapiens neuregulin 1 (NRG1), | NM_001160005.1 | 4 | NP_001153477.1 | 130 |
| | transcript variant HRG-beta3b, | | | | |
| | mRNA | | | | |
| 5 | Homo sapiens neuregulin 1 (NRG1), | NM_001160002.1 | 5 | NP_001153474.1 | 131 |
| | transcript variant HRG-gamma2, | | | | |
| | mRNA | | | | |
| 6 | Homo sapiens neuregulin 1 (NRG1), | NM_001159999.1 | 6 | NP_001153471.1 | 132 |
| | transcript variant HRG-beta1b, | | | | |
| | mRNA | | | | |
| 7 | Homo sapiens neuregulin 1 (NRG1), | NM_001159995.1 | 7 | NP_001153467.1 | 133 |
| | transcript variant HRG-beta1c, | | | | |
| | mRNA | | | | |
| 8 | Homo sapiens neuregulin 1 (NRG1), | NM_001159995.1 | 8 | NP_001153467.1 | 134 |
| | transcript variant HRG-beta1c, | | | | |
| | mRNA | | | | |
| 9 | Homo sapiens neuregulin 1 (NRG1), | NM_013957.3 | 9 | NP_039251.2 | 135 |
| | transcript variant HRG-beta2, mRNA | | | | |
| 10 | Homo sapiens neuregulin 1 (NRG1), | NM_013957.3 | 10 | NP_039251.2 | 136 |
| | transcript variant HRG-beta2, mRNA | | | | |
| 11 | Homo sapiens neuregulin 1 (NRG1), | NM_004495.3 | 11 | NP_004486.2 | 137 |
| | transcript variant HRG-gamma, | | | | |
| | mRNA | | | | |
| 12 | Homo sapiens neuregulin 1 (NRG1), | NM_013959.3 | 12 | NP_039253.1 | 138 |
| | transcript variant SMDF, mRNA | | | | |
| 13 | Homo sapiens neuregulin 1 (NRG1), | NM_013962.2 | 13 | NP_039256.2 | 139 |
| | transcript variant GGF2, mRNA | | | | |
| 14 | Homo sapiens neuregulin 1 (NRG1), | NM_001160007.1 | 14 | NP_001153479.1 | 140 |
| | transcript variant HRG-gamma3, | | | | |
| | mRNA | | | | |
| 15 | Homo sapiens neuregulin 1 (NRG1), | NM_001160004.1 | 15 | NP_001153476.1 | 141 |
| | transcript variant ndf43b, mRNA | | | | |
| 16 | Homo sapiens neuregulin 1 (NRG1), | NM_001160001.1 | 16 | NP_001153473.1 | 142 |
| | transcript variant HRG-beta1d, | | | | |
| | mRNA | | | | |
| 17 | Homo sapiens neuregulin 1 (NRG1), | NM_001159996.1 | 17 | NP_001153468.1 | 143 |
| | transcript variant ndf43c, mRNA | | | | |
| 18 | Homo sapiens neuregulin 1 (NRG1), | NM_013958.3 | 18 | NP_039252.2 | 144 |
| | transcript variant HRG-beta3, mRNA | | | | |
| 19 | Homo sapiens neuregulin 1 (NRG1), | NM_013956.3 | 19 | NP_039250.2 | 145 |
| | transcript variant HRG-beta1, mRNA | | | | |
| 20 | Homo sapiens neuregulin 1 (NRG1), | NM_013964.3 | 20 | NP_039258.1 | 146 |
| | transcript variant HRG-alpha, mRNA | | | | |
| 21 | Homo sapiens neuregulin 1 (NRG1), | NM_013960.3 | 21 | NP_039254.1 | 147 |
| | transcript variant ndf43, mRNA | | | | |
| 22 | Homo sapiens vascular endothelial | NM_001171623.1 | 22 | NP_001165094.1 | 148 |
| | growth factor A (VEGFA), transcript | | | | |
| | variant 1, mRNA | | | | |
| 23 | Homo sapiens vascular endothelial | NM_001025366.2 | 23 | NP_001020537.2 | 149 |
| | growth factor A (VEGFA), transcript | | | | |
| | variant 1, mRNA | | | | |
| 24 | Homo sapiens vascular endothelial | NM_001171624.1 | 24 | NP_001165095.1 | 150 |
| | growth factor A (VEGFA), transcript | | | | |
| | variant 2, mRNA | | | | |
| 25 | Homo sapiens vascular endothelial | NM_003376.5 | 25 | NP_003367.4 | 151 |
| | growth factor A (VEGFA), transcript | | | | |
| | variant 2, mRNA | | | | |
| 26 | Homo sapiens vascular endothelial | NM_001171625.1 | 26 | NP_001165096.1 | 152 |
| | growth factor A (VEGFA), transcript | | | | |
| | variant 3, mRNA | | | | |
| 27 | Homo sapiens vascular endothelial | NM_001025367.2 | 27 | NP_001020538.2 | 153 |
| | growth factor A (VEGFA), transcript | | | | |
| | variant 3, mRNA | | | | |
| 28 | Homo sapiens vascular endothelial | NM_001171626.1 | 28 | NP_001165097.1 | 154 |
| | growth factor A (VEGFA), transcript | | | | |
| | variant 4, mRNA | | | | |
| 29 | Homo sapiens vascular endothelial | NM_001025368.2 | 29 | NP_001020539.2 | 155 |
| | growth factor A (VEGFA), transcript | | | | |
| | variant 4, mRNA | | | | |
| 30 | Homo sapiens vascular endothelial | NM_001171627.1 | 30 | NP_001165098.1 | 156 |
| | growth factor A (VEGFA), transcript | | | | |
| | variant 5, mRNA | | | | |
| 31 | Homo sapiens vascular endothelial | NM_001025369.2 | 31 | NP_001020540.2 | 157 |
| | growth factor A (VEGFA), transcript | | | | |
| | variant 5, mRNA | | | | |
| 32 | Homo sapiens vascular endothelial | NM_001171628.1 | 32 | NP_001165099.1 | 158 |
| | growth factor A (VEGFA), transcript | | | | |
| | variant 6, mRNA | | | | |
| 33 | Homo sapiens vascular endothelial | NM_001025370.2 | 33 | NP_001020541.2 | 159 |
| | growth factor A (VEGFA), transcript | | | | |
| | variant 6, mRNA | | | | |
| 34 | Homo sapiens vascular endothelial | NM_001171629.1 | 34 | NP_001165100.1 | 160 |
| | growth factor A (VEGFA), transcript | | | | |
| | variant 7, mRNA | | | | |
| 35 | Homo sapiens vascular endothelial | NM_001033756.2 | 35 | NP_001028928.1 | 161 |
| | growth factor A (VEGFA), transcript | | | | |
| | variant 7, mRNA | | | | |
| 36 | Homo sapiens vascular endothelial | NM_001171630.1 | 36 | NP_001165101.1 | 162 |
| | growth factor A (VEGFA), transcript | | | | |
| | variant 8, mRNA | | | | |
| 37 | Homo sapiens vascular endothelial | NM_001171622.1 | 37 | NP_001165093.1 | 163 |
| | growth factor A (VEGFA), transcript | | | | |
| | variant 8, mRNA | | | | |
| 38 | Homo sapiens vascular endothelial | NM_001204385.1 | 38 | NP_001191314.1 | 164 |
| | growth factor A (VEGFA), transcript | | | | |
| | variant 9, mRNA | | | | |
| 39 | Homo sapiens vascular endothelial | NM_001204385.1 | 39 | NP_001191314.1 | 165 |
| | growth factor A (VEGFA), transcript | | | | |
| | variant 9, mRNA | | | | |
| 40 | Homo sapiens vascular endothelial | NM_001204384.1 | 40 | NP_001191313.1 | 166 |
| | growth factor A (VEGFA), transcript | | | | |
| | variant 9, mRNA | | | | |
| 41 | Homo sapiens vascular endothelial | NM_001243733.1 | 41 | NP_001230662.1 | 167 |
| | growth factor B (VEGFB), transcript | | | | |
| | variant VEGFB-167, mRNA | | | | |
| 42 | Homo sapiens vascular endothelial | NM_005429.2 | 42 | NP_005420.1 | 168 |
| | growth factor C (VEGFC), mRNA | | | | |
| 43 | Homo sapiens vascular endothelial | NM_003377.4 | 43 | NP_003368.1 | 169 |
| | growth factor B (VEGFB), transcript | | | | |
| | variant VEGFB-186, mRNA | | | | |
| 44 | Homo sapiens vascular cell adhesion | NM_001078.3 | 44 | NP_001069.1 | 170 |
| | molecule 1 (VCAM1), transcript | | | | |
| | variant 1, mRNA | | | | |
| 45 | Homo sapiens vascular cell adhesion | NM_080682.2 | 45 | NP_542413.1 | 171 |
| | molecule 1 (VCAM1), transcript | | | | |
| | variant 2, mRNA | | | | |
| 46 | Homo sapiens vascular cell adhesion | NM_001199834.1 | 46 | NP_001186763.1 | 172 |
| | molecule 1 (VCAM1), transcript | | | | |
| | variant 3, mRNA | | | | |
| 47 | Homo sapiens major | NM_002124.3 | 47 | NP_002115.2 | 173 |
| | histocompatibility complex, class II, | | | | |
| | DR beta 1 (HLA-DRB1), transcript | | | | |
| | variant 1, mRNA | | | | |
| 48 | Homo sapiens major | NM_002117.5 | 48 | NP_002108.4 | 174 |
| | histocompatibility complex, class I, C | | | | |
| | (HLA-C), transcript variant 1, mRNA | | | | |
| 49 | Homo sapiens major | NM_002116.7 | 49 | NP_002107.3 | 175 |
| | histocompatibility complex, class I, A | | | | |
| | (HLA-A), transcript variant 1, mRNA | | | | |
| 50 | Homo sapiens major | NM_005514.6 | 50 | NP_005505.2 | 176 |
| | histocompatibility complex, class I, B | | | | |
| | (HLA-B), mRNA | | | | |
| 51 | Homo sapiens major | NM_001243965.1 | 51 | NP_001230894.1 | 177 |
| | histocompatibility complex, class II, | | | | |
| | DR beta 1 (HLA-DRB1), transcript | | | | |
| | variant 2, mRNA | | | | |
| 52 | Homo sapiens major | NM_001243042.1 | 52 | NP_001229971.1 | 178 |
| | histocompatibility complex, class I, C | | | | |
| | (HLA-C), transcript variant 2, mRNA | | | | |
| 53 | Homo sapiens major | NM_001242758.1 | 53 | NP_001229687.1 | 179 |
| | histocompatibility complex, class I, A | | | | |
| | (HLA-A), transcript variant 2, mRNA | | | | |
| 54 | Homo sapiens major | NM_005516.5 | 54 | NP_005507.3 | 180 |
| | histocompatibility complex, class I, E | | | | |
| | (HLA-E), mRNA | | | | |
| 55 | Homo sapiens major | NM_002125.3 | 55 | NP_002116.2 | 181 |
| | histocompatibility complex, class II, | | | | |
| | DR beta 5 (HLA-DRB5), mRNA | | | | |
| 56 | Homo sapiens major | NM_020056.4 | 56 | NP_064440.1 | 182 |
| | histocompatibility complex, class II, | | | | |
| | DQ alpha 2 (HLA-DQA2), mRNA | | | | |
| 57 | Homo sapiens major | NM_022555.3 | 57 | NP_072049.2 | 183 |
| | histocompatibility complex, class II, | | | | |
| | DR beta 3 (HLA-DRB3), mRNA | | | | |
| 58 | Homo sapiens major | NM_001242524.1 | 58 | NP_001229453.1 | 184 |
| | histocompatibility complex, class II, | | | | |
| | DP alpha 1 (HLA-DPA1), transcript | | | | |
| | variant 2, mRNA | | | | |
| 59 | Homo sapiens major | NM_001242525.1 | 59 | NP_001229454.1 | 185 |
| | histocompatibility complex, class II, | | | | |
| | DP alpha 1 (HLA-DPA1), transcript | | | | |
| | variant 3, mRNA | | | | |
| 60 | Homo sapiens CD74 molecule, major | NM_001025159.2 | 60 | NP_001020330.1 | 186 |
| | histocompatibility complex, class II | | | | |
| | invariant chain (CD74), transcript | | | | |
| | variant 1, mRNA | | | | |
| 61 | Homo sapiens major | NM_002121.5 | 61 | NP_002112.3 | 187 |
| | histocompatibility complex, class II, | | | | |
| | DP beta 1 (HLA-DPB1), mRNA | | | | |
| 62 | Homo sapiens major | NM_019111.4 | 62 | NP_061984.2 | 188 |
| | histocompatibility complex, class II, | | | | |
| | DR alpha (HLA-DRA), mRNA | | | | |
| 63 | Homo sapiens major | NM_002119.3 | 63 | NP_002110.1 | 189 |
| | histocompatibility complex, class II, | | | | |
| | DO alpha (HLA-DOA), mRNA | | | | |
| 64 | Homo sapiens major | NM_001198858.1 | 64 | NP_001185787.1 | 190 |
| | histocompatibility complex, class II, | | | | |
| | DQ beta 2 (HLA-DQB2), mRNA | | | | |
| 65 | Homo sapiens major | NM_001195000.1 | 65 | NP_001181929.1 | 191 |
| | histocompatibility complex, class I- | | | | |
| | related (MR1), transcript variant 3, | | | | |
| | mRNA | | | | |
| 66 | Homo sapiens major | NM_001194999.1 | 66 | NP_001181928.1 | 192 |
| | histocompatibility complex, class I- | | | | |
| | related (MR1), transcript variant 2, | | | | |
| | mRNA | | | | |
| 67 | Homo sapiens major | NM_002118.4 | 67 | NP_002109.2 | 193 |
| | histocompatibility complex, class II, | | | | |
| | DM beta (HLA-DMB), mRNA | | | | |
| 68 | Homo sapiens major | NM_001195035.1 | 68 | NP_001181964.1 | 194 |
| | histocompatibility complex, class I- | | | | |
| | related (MR1), transcript variant 4, | | | | |
| | mRNA | | | | |
| 69 | Homo sapiens major | NM_001531.2 | 69 | NP_001522.1 | 195 |
| | histocompatibility complex, class I- | | | | |
| | related (MR1), transcript variant 1, | | | | |
| | mRNA | | | | |
| 70 | Homo sapiens major | NM_021983.4 | 70 | NP_068818.4 | 196 |
| | histocompatibility complex, class II, | | | | |
| | DR beta 4 (HLA-DRB4), mRNA | | | | |
| 71 | Homo sapiens major | NM_002122.3 | 71 | NP_002113.2 | 197 |
| | histocompatibility complex, class II, | | | | |
| | DQ alpha 1 (HLA-DQA1), mRNA | | | | |
| 72 | Homo sapiens major | NM_002123.4 | 72 | NP_002114.3 | 198 |
| | histocompatibility complex, class II, | | | | |
| | DQ beta 1 (HLA-DQB1), transcript | | | | |
| | variant 1, mRNA | | | | |
| 73 | Homo sapiens major | NM_001243961.1 | 73 | NP_001230890.1 | 199 |
| | histocompatibility complex, class II, | | | | |
| | DQ beta 1 (HLA-DQB1), transcript | | | | |
| | variant 2, mRNA | | | | |
| 74 | Homo sapiens major | NM_001243962.1 | 74 | NP_001230891.1 | 200 |
| | histocompatibility complex, class II, | | | | |
| | DQ beta 1 (HLA-DQB1), transcript | | | | |
| | variant 3, mRNA | | | | |
| 75 | Homo sapiens major | NM_002120.3 | 75 | NP_002111.1 | 201 |
| | histocompatibility complex, class II, | | | | |
| | DO beta (HLA-DOB), mRNA | | | | |
| 76 | Homo sapiens major | NM_033554.3 | 76 | NP_291032.2 | 202 |
| | histocompatibility complex, class II, | | | | |
| | DP alpha 1 (HLA-DPA1), transcript | | | | |
| | variant 1, mRNA | | | | |
| 77 | Homo sapiens major | NM_006120.3 | 77 | NP_006111.2 | 203 |
| | histocompatibility complex, class II, | | | | |
| | DM alpha (HLA-DMA), mRNA | | | | |
| 78 | Homo sapiens major | NM_018950.2 | 78 | NP_061823.2 | 204 |
| | histocompatibility complex, class I, F | | | | |
| | (HLA-F), transcript variant 2, mRNA | | | | |
| 79 | Homo sapiens major | NM_001098479.1 | 79 | NP_001091949.1 | 205 |
| | histocompatibility complex, class I, F | | | | |
| | (HLA-F), transcript variant 1, mRNA | | | | |
| 80 | Homo sapiens major | NM_001098478.1 | 80 | NP_001091948.1 | 206 |
| | histocompatibility complex, class I, F | | | | |
| | (HLA-F), transcript variant 3, mRNA | | | | |
| 81 | Homo sapiens major | NM_002127.5 | 81 | NP_002118.1 | 207 |
| | histocompatibility complex, class I, G | | | | |
| | (HLA-G), mRNA | | | | |
| 82 | Homo sapiens heat shock 27 kDa | NM_001540.3 | 82 | NP_001531.1 | 208 |
| | protein 1 (HSPB1), mRNA | | | | |
| 83 | Homo sapiens heat shock protein | NM_005348.3 | 83 | NP_005339.3 | 209 |
| | 90 kDa alpha (cytosolic), class A | | | | |
| | member 1 (HSP90AA1), transcript | | | | |
| | variant 2, mRNA | | | | |
| 84 | Homo sapiens heat shock protein, | NM_144617.2 | 84 | NP_653218.1 | 210 |
| | alpha-crystallin-related, B6 (HSPB6), | | | | |
| | mRNA | | | | |
| 85 | Homo sapiens heat shock protein | NM_001017963.2 | 85 | NP_001017963.2 | 211 |
| | 90 kDa alpha (cytosolic), class A | | | | |
| | member 1 (HSP90AA1), transcript | | | | |
| | variant 1, mRNA | | | | |
| 86 | Homo sapiens heat shock protein | NM_007355.2 | 86 | NP_031381.2 | 212 |
| | 90 kDa alpha (cytosolic), class B | | | | |
| | member 1 (HSP90AB1), mRNA | | | | |
| 87 | Homo sapiens heat shock 10 kDa | NM_002157.2 | 87 | NP_002148.1 | 213 |
| | protein 1 (chaperonin 10) (HSPE1), | | | | |
| | nuclear gene encoding mitochondrial | | | | |
| | protein, mRNA | | | | |
| 88 | Homo sapiens heat shock 70 kDa | NM_005346.4 | 88 | NP_005337.2 | 214 |
| | protein 1B (HSPA1B), mRNA | | | | |
| 89 | Homo sapiens heat shock 70 kDa | NM_005345.5 | 89 | NP_005336.3 | 215 |
| | protein 1A (HSPA1A), mRNA | | | | |
| 90 | Homo sapiens heat shock | NM_006644.2 | 90 | NP_006635.2 | 216 |
| | 105 kDa/110 kDa protein 1 (HSPH1), | | | | |
| | mRNA | | | | |
| 91 | Homo sapiens heat shock 70 kDa | NM_021979.3 | 91 | NP_068814.2 | 217 |
| | protein 2 (HSPA2), mRNA | | | | |
| 92 | Homo sapiens heat shock 27 kDa | NM_006308.2 | 92 | NP_006299.1 | 218 |
| | protein 3 (HSPB3), mRNA | | | | |
| 93 | Homo sapiens B-cell CLL/lymphoma | NM_000633.2 | 93 | NP_000624.2 | 219 |
| | 2 (BCL2), nuclear gene encoding | | | | |
| | mitochondrial protein, transcript | | | | |
| | variant alpha, mRNA | | | | |
| 94 | Homo sapiens B-cell CLL/lymphoma | NM_000657.2 | 94 | NP_000648.2 | 220 |
| | 2 (BCL2), nuclear gene encoding | | | | |
| | mitochondrial protein, transcript | | | | |
| | variant beta, mRNA | | | | |
| 95 | Homo sapiens nitric oxide synthase 3 | NM_001160110.1 | 95 | NP_001153582.1 | 221 |
| | (endothelial cell) (NOS3), transcript | | | | |
| | variant 3, mRNA | | | | |
| 96 | Homo sapiens nitric oxide synthase 3 | NM_000603.4 | 96 | NP_000594.2 | 222 |
| | (endothelial cell) (NOS3), transcript | | | | |
| | variant 1, mRNA | | | | |
| 97 | Homo sapiens nitric oxide synthase 3 | NM_001160111.1 | 97 | NP_001153583.1 | 223 |
| | (endothelial cell) (NOS3), transcript | | | | |
| | variant 4, mRNA | | | | |
| 98 | Homo sapiens nitric oxide synthase 3 | NM_001160109.1 | 98 | NP_001153581 | 224 |
| | (endothelial cell) (NOS3), transcript | | | | |
| | variant 2, mRNA | | | | |
| 99 | Homo sapiens nitric oxide synthase 1 | NM_001204218.1 | 99 | NP_001191147.1 | 225 |
| | (neuronal) (NOS1), transcript variant | | | | |
| | 2, mRNA | | | | |
| 100 | Homo sapiens nitric oxide synthase 1 | NM_000620.4 | 100 | NP_000611.1 | 226 |
| | (neuronal) (NOS1), transcript variant | | | | |
| | 1, mRNA | | | | |
| 101 | Homo sapiens nitric oxide synthase 1 | NM_001204214.1 | 101 | NP_001191143.1 | 227 |
| | (neuronal) (NOS1), transcript variant | | | | |
| | 4, mRNA | | | | |
| 102 | Homo sapiens nitric oxide synthase 1 | NM_001204213.1 | 102 | NP_001191142.1 | 228 |
| | (neuronal) (NOS1), transcript variant | | | | |
| | 3, mRNA | | | | |
| 103 | Homo sapiens nitric oxide synthase 2, | NM_000625.4 | 103 | NP_000616.3 | 229 |
| | inducible (NOS2), mRNA | | | | |
| 104 | Homo sapiens interleukin 4 (IL4), | NM_000589.3 | 104 | NP_000580.1 | 230 |
| | transcript variant 1, mRNA | | | | |
| 105 | Homo sapiens interleukin 4 (IL4), | NM_172348.2 | 105 | NP_758858.1 | 231 |
| | transcript variant 2, mRNA | | | | |
| 106 | Homo sapiens interleukin 10 (IL10), | NM_000572.2 | 106 | NP_000563.1 | 232 |
| | mRNA | | | | |
| 107 | Homo sapiens transforming growth | NM_000660.4 | 107 | NP_000651.3 | 233 |
| | factor, beta 1 (TGFB1), mRNA | | | | |
| 108 | Homo sapiens heme oxygenase | NM_002133.2 | 108 | NP_002124.1 | 234 |
| | (decycling) 1 (HMOX1), mRNA | | | | |
| 109 | Homo sapiens killer cell | NM_014219.2 | 109 | NP_055034.2 | 235 |
| | immunoglobulin-like receptor, two | | | | |
| | domains, long cytoplasmic tail, 2 | | | | |
| | (KIR2DL2), mRNA | | | | |
| 110 | Homo sapiens killer cell | NM_012312.2 | 110 | NP_036444.1 | 236 |
| | immunoglobulin-like receptor, two | | | | |
| | domains, short cytoplasmic tail, 2 | | | | |
| | (KIR2DS2), mRNA | | | | |
| 111 | Homo sapiens killer cell | NM_015868.2 | 111 | NP_056952.2 | 237 |
| | immunoglobulin-like receptor, two | | | | |
| | domains, long cytoplasmic tail, 3 | | | | |
| | (KIR2DL3), mRNA | | | | |
| 112 | Homo sapiens killer cell | NM_014513.2 | 112 | NP_055328.2 | 238 |
| | immunoglobulin-like receptor, two | | | | |
| | domains, short cytoplasmic tail, 5 | | | | |
| | (KIR2DS5), mRNA | | | | |
| 113 | Homo sapiens killer cell | NM_001080770.1 | 113 | NP_001074239.1 | 239 |
| | immunoglobulin-like receptor, two | | | | |
| | domains, long cytoplasmic tail, 4 | | | | |
| | (KIR2DL4), transcript variant 3, | | | | |
| | mRNA | | | | |
| 114 | Homo sapiens killer cell | NM_006737.3 | 114 | NP_006728.2 | 240 |
| | immunoglobulin-like receptor, three | | | | |
| | domains, long cytoplasmic tail, 2 | | | | |
| | (KIR3DL2), transcript variant 1, | | | | |
| | mRNA | | | | |
| 115 | Homo sapiens killer cell | NM_153443.3 | 115 | NP_703144.2 | 241 |
| | immunoglobulin-like receptor, three | | | | |
| | domains, long cytoplasmic tail, 3 | | | | |
| | (KIR3DL3), mRNA | | | | |
| 116 | Homo sapiens killer cell | NM_014218.2 | 116 | NP_055033.2 | 242 |
| | immunoglobulin-like receptor, two | | | | |
| | domains, long cytoplasmic tail, 1 | | | | |
| | (KIR2DL1), mRNA | | | | |
| 117 | Homo sapiens killer cell | NM_014512.1 | 117 | NP_055327.1 | 243 |
| | immunoglobulin-like receptor, two | | | | |
| | domains, short cytoplasmic tail, 1 | | | | |
| | (KIR2DS1), mRNA | | | | |
| 118 | Homo sapiens killer cell | NM_013289.2 | 118 | NP_037421.2 | 244 |
| | immunoglobulin-like receptor, three | | | | |
| | domains, long cytoplasmic tail, 1 | | | | |
| | (KIR3DL1), mRNA | | | | |
| 119 | Homo sapiens killer cell | NM_012314.3 | 119 | NP_036446.3 | 245 |
| | immunoglobulin-like receptor, two | | | | |
| | domains, short cytoplasmic tail, 4 | | | | |
| | (KIR2DS4), mRNA | | | | |
| 120 | Homo sapiens killer cell | NM_020535.3 | 120 | NP_065396.1 | 246 |
| | immunoglobulin-like receptor, two | | | | |
| | domains, long cytoplasmic tail, 5A | | | | |
| | (KIR2DL5A), mRNA | | | | |
| 121 | Homo sapiens killer cell | NM_001080772.1 | 121 | NP_001074241.1 | 247 |
| | immunoglobulin-like receptor, two | | | | |
| | domains, long cytoplasmic tail, 4 | | | | |
| | (KIR2DL4), transcript variant 2, | | | | |
| | mRNA | | | | |
| 122 | Homo sapiens killer cell | NM_002255.5 | 122 | NP_002246.5 | 248 |
| | immunoglobulin-like receptor, two | | | | |
| | domains, long cytoplasmic tail, 4 | | | | |
| | (KIR2DL4), transcript variant 1, | | | | |
| | mRNA | | | | |
| 123 | Homo sapiens killer cell | NM_001083539.1 | 123 | NP_001077008.1 | 249 |
| | immunoglobulin-like receptor, three | | | | |
| | domains, short cytoplasmic tail, 1 | | | | |
| | (KIR3DS1), mRNA | | | | |
| 124 | Homo sapiens killer cell | NM_001018081.1 | 124 | NP_001018091.1 | 250 |
| | immunoglobulin-like receptor, two | | | | |
| | domains, long cytoplasmic tail, 5B | | | | |
| | (KIR2DL5B), mRNA | | | | |
| 125 | Homo sapiens killer cell | NM_001242867.1 | 125 | NP_001229796.1 | 251 |
| | immunoglobulin-like receptor, three | | | | |
| | domains, long cytoplasmic tail, 2 | | | | |
| | (KIR3DL2), transcript variant 2, | | | | |
| | mRNA | | | | |
| 126 | Homo sapiens killer cell | NM_012313.1 | 126 | NP_036445.1 | 252 |
| | immunoglobulin-like receptor, two | | | | |
| | domains, short cytoplasmic tail, 3 | | | | |
| | (KIR2DS3), mRNA | | | | |

### Prevention or Reduction of Innate Cellular Immune Response Activation

[0301] The modified nucleic acid molecules, e.g., mmRNA, described herein, decrease the innate immune response in a cell. The term “innate immune response” includes a cellular response to exogenous single stranded nucleic acids, generally of viral or bacterial origin, which involves the induction of cytokine expression and release, particularly the interferons, and cell death. Protein synthesis is also reduced during the innate cellular immune response. While it is advantageous to eliminate the innate immune response in a cell, the invention provides modified mRNAs that substantially reduce the immune response, including interferon signaling, without entirely eliminating such a response. In some embodiments, the immune response is reduced by 10%, 20%, 30%, 40%, 50%, 60%, 70%, 80%, 90%, 95%, 99%, 99.9%, or greater than 99.9% as compared to the immune response induced by a corresponding unmodified nucleic acid. Such a reduction can be measured by expression or activity level of Type 1 interferons or the expression of interferon-regulated genes such as the toll-like receptors (e.g., TLR7 and TLR8). Reduction of innate immune response can also be measured by decreased cell death following one or more administrations of modified RNAs to a cell population; e.g., cell death is 10%, 25%, 50%, 75%, 85%, 90%, 95%, or over 95% less than the cell death frequency observed with a corresponding unmodified nucleic acid. Moreover, cell death may affect fewer than 50%, 40%, 30%, 20%, 10%, 5%, 1%, 0.1%, 0.01% or fewer than 0.01% of cells contacted with the modified nucleic acids.

[0302] The present disclosure provides for the repeated introduction (e.g., transfection) of modified nucleic acids into a target cell population, e.g., in vitro, ex vivo, or in vivo. The step of contacting the cell population may be repeated one or more times (such as two, three, four, five or more than five times). In some embodiments, the step of contacting the cell population with the modified nucleic acids is repeated a number of times sufficient such that a predetermined efficiency of protein translation in the cell population is achieved. Given the reduced cytotoxicity of the target cell population provided by the nucleic acid modifications, such repeated transfections are achievable in a diverse array of cell types.

[0303] The modified nucleic acids of the invention, including the combination of modifications taught herein may have superior properties making them more suitable as therapeutic modalities.

### Therapeutic Agents

[0304] The modified nucleic acids (modified RNAs) and the proteins translated from the modified nucleic acids described herein can be used as therapeutic agents. For example, a modified nucleic acid described herein can be administered to a subject, wherein the modified nucleic acid is translated in vivo to produce a therapeutic peptide in the subject. Provided are compositions, methods, kits, and reagents for treatment or prevention of disease or conditions in humans and other mammals. The active therapeutic agents of the invention include modified nucleic acids, cells containing modified nucleic acids or polypeptides translated from the modified nucleic acids, polypeptides translated from modified nucleic acids, and cells contacted with cells containing modified nucleic acids or polypeptides translated from the modified nucleic acids.

[0305] In certain embodiments, provided are combination therapeutics containing one or more modified nucleic acids containing translatable regions that encode for a protein or proteins that boost a mammalian subject's immunity along with a protein that induces antibody-dependent cellular toxitity. For example, provided are therapeutics containing one or more nucleic acids that encode trastuzumab and granulocyte-colony stimulating factor (G-CSF). In particular, such combination therapeutics are useful in Her2+ breast cancer patients who develop induced resistance to trastuzumab. (See, e.g., Albrecht, Immunotherapy. 2(6):795-8 (2010); herein incorporated by reference in its entirety).

[0306] Provided are methods of inducing translation of a recombinant polypeptide in a cell population using the modified nucleic acids described herein. Such translation can be in vivo, ex vivo, in culture, or in vitro. The cell population is contacted with an effective amount of a composition containing a nucleic acid that has at least one nucleoside modification, and a translatable region encoding the recombinant polypeptide. The population is contacted under conditions such that the nucleic acid is localized into one or more cells of the cell population and the recombinant polypeptide is translated in the cell from the nucleic acid.

[0307] An effective amount of the composition is provided based, at least in part, on the target tissue, target cell type, means of administration, physical characteristics of the nucleic acid (e.g., size, and extent of modified nucleosides), and other determinants. In general, an effective amount of the composition provides efficient protein production in the cell, preferably more efficient than a composition containing a corresponding unmodified nucleic acid. Increased efficiency may be demonstrated by increased cell transfection (i.e., the percentage of cells transfected with the nucleic acid), increased protein translation from the nucleic acid, decreased nucleic acid degradation (as demonstrated, e.g., by increased duration of protein translation from a modified nucleic acid), or reduced innate immune response of the host cell.

[0308] Aspects of the invention are directed to methods of inducing in vivo translation of a recombinant polypeptide in a mammalian subject in need thereof. Therein, an effective amount of a composition containing a nucleic acid that has at least one nucleoside modification and a translatable region encoding the recombinant polypeptide is administered to the subject using the delivery methods described herein. The nucleic acid is provided in an amount and under other conditions such that the nucleic acid is localized into a cell of the subject and the recombinant polypeptide is translated in the cell from the nucleic acid. The cell in which the nucleic acid is localized, or the tissue in which the cell is present, may be targeted with one or more than one rounds of nucleic acid administration.

[0309] Other aspects of the invention relate to transplantation of cells containing modified nucleic acids to a mammalian subject. Administration of cells to mammalian subjects is known to those of ordinary skill in the art, such as local implantation (e.g., topical or subcutaneous administration), organ delivery or systemic injection (e.g., intravenous injection or inhalation), as is the formulation of cells in pharmaceutically acceptable carrier. Compositions containing modified nucleic acids are formulated for administration intramuscularly, transarterially, intraocularly, vaginally, rectally, intraperitoneally, intravenously, intranasally, subcutaneously, endoscopically, transdermally, intramuscularly, intraventricularly, intradermally, intrathecally, topically (e.g. by powders, ointments, creams, gels, lotions, and/or drops), mucosally, nasal, enterally, intratumorally, by intratracheal instillation, bronchial instillation, and/or inhalation; nasal spray and/or aerosol, and/or through a portal vein catheter. In some embodiments, the composition is formulated for extended release. In specific embodiments, modified nucleic acid molecules or complexes, and/or pharmaceutical, prophylactic, diagnostic, or imaging compositions thereof, may be administered in a way which allows the modified nucleic acid molecules or complex to cross the blood-brain barrier, vascular barrier, or other epithelial barrier.

[0310] However, the present disclosure encompasses the delivery of modified nucleic acid molecules or complexes, and/or pharmaceutical, prophylactic, diagnostic, or imaging compositions thereof, by any appropriate route taking into consideration likely advances in the sciences of drug delivery.

[0311] The subject to whom the therapeutic agent is administered suffers from or is at risk of developing a disease, disorder, or deleterious condition. Provided are methods of identifying, diagnosing, and classifying subjects on these bases, which may include clinical diagnosis, biomarker levels, genome-wide association studies (GWAS), and other methods known in the art.

[0312] In certain embodiments, the administered modified nucleic acid directs production of one or more recombinant polypeptides that provide a functional activity which is substantially absent in the cell in which the recombinant polypeptide is translated. For example, the missing functional activity may be enzymatic, structural, or gene regulatory in nature. In related embodiments, the administered modified nucleic acid directs production of one or more recombinant polypeptides that increases (e.g., synergistically) a functional activity which is present but substantially deficient in the cell in which the recombinant polypeptide is translated.

[0313] In other embodiments, the administered modified nucleic acid directs production of one or more recombinant polypeptides that replace a polypeptide (or multiple polypeptides) that is substantially absent in the cell in which the recombinant polypeptide is translated. Such absence may be due to genetic mutation of the encoding gene or regulatory pathway thereof. In some embodiments, the recombinant polypeptide increases the level of an endogenous protein in the cell to a desirable level; such an increase may bring the level of the endogenous protein from a subnormal level to a normal level, or from a normal level to a super-normal level.

[0314] Alternatively, the recombinant polypeptide functions to antagonize the activity of an endogenous protein present in, on the surface of, or secreted from the cell. Usually, the activity of the endogenous protein is deleterious to the subject, for example, do to mutation of the endogenous protein resulting in altered activity or localization. Additionally, the recombinant polypeptide antagonizes, directly or indirectly, the activity of a biological moiety present in, on the surface of, or secreted from the cell. Examples of antagonized biological moieties include lipids (e.g., cholesterol), a lipoprotein (e.g., low density lipoprotein), a nucleic acid, a carbohydrate, a protein toxin such as shiga and tetanus toxins, or a small molecule toxin such as botulinum, cholera, and diphtheria toxins. Additionally, the antagonized biological molecule may be an endogenous protein that exhibits an undesirable activity, such as a cytotoxic or cytostatic activity.

[0315] The recombinant proteins described herein are engineered for localization within the cell, potentially within a specific compartment such as the nucleus, or are engineered for secretion from the cell or translocation to the plasma membrane of the cell.

### Therapeutics for Diseases and Conditions

[0316] Provided are methods for treating or preventing a symptom of diseases characterized by missing or aberrant protein activity, by replacing the missing protein activity or overcoming the aberrant protein activity. Because of the rapid initiation of protein production following introduction of modified mRNAs, as compared to viral DNA vectors, the compounds of the present invention are particularly advantageous in treating acute diseases such as sepsis, stroke, and myocardial infarction. Moreover, the lack of transcriptional regulation of the modified mRNAs of the invention is advantageous in that accurate titration of protein production is achievable.

[0317] In some embodiments, modified mRNAs may be derived from cDNA.

[0318] In some embodiments, modified mRNAs and their encoded polypeptides in accordance with the present invention may be used for therapeutic purposes. In some embodiments, modified mRNAs and their encoded polypeptides in accordance with the present invention may be used for treatment of any of a variety of diseases, disorders, and/or conditions, including but not limited to one or more of the following: autoimmune disorders (e.g. diabetes, lupus, multiple sclerosis, psoriasis, rheumatoid arthritis); inflammatory disorders (e.g. arthritis, pelvic inflammatory disease); infectious diseases (e.g. viral infections (e.g., HIV, HCV, RSV), bacterial infections, fungal infections, sepsis); neurological disorders (e.g. Alzheimer's disease, Huntington's disease; autism; Duchenne muscular dystrophy); cardiovascular disorders (e.g. atherosclerosis, hypercholesterolemia, thrombosis, clotting disorders, angiogenic disorders such as macular degeneration); proliferative disorders (e.g. cancer, benign neoplasms); respiratory disorders (e.g. chronic obstructive pulmonary disease); digestive disorders (e.g. inflammatory bowel disease, ulcers); musculoskeletal disorders (e.g. fibromyalgia, arthritis); endocrine, metabolic, and nutritional disorders (e.g. diabetes, osteoporosis); urological disorders (e.g. renal disease); psychological disorders (e.g. depression, schizophrenia); skin disorders (e.g. wounds, eczema); blood and lymphatic disorders (e.g. anemia, hemophilia); etc.

[0319] Diseases characterized by dysfunctional or aberrant protein activity include cystic fibrosis, sickle cell anemia, epidermolysis bullosa, amyotrophic lateral sclerosis, and glucose-6-phosphate dehydrogenase deficiency. The present invention provides a method for treating such conditions or diseases in a subject by introducing nucleic acid or cell-based therapeutics containing the modified nucleic acids provided herein, wherein the modified nucleic acids encode for a protein that antagonizes or otherwise overcomes the aberrant protein activity present in the cell of the subject. Specific examples of a dysfunctional protein are the missense mutation variants of the cystic fibrosis transmembrane conductance regulator (CFTR) gene, which produce a dysfunctional protein variant of CFTR protein, which causes cystic fibrosis.

[0320] Diseases characterized by missing (or substantially diminished such that proper protein function does not occur) protein activity include cystic fibrosis, Niemann-Pick type C, β thalassemia major, Duchenne muscular dystrophy, Hurler Syndrome, Hunter Syndrome, and Hemophilia A. Such proteins may not be present, or are essentially non-functional. The present invention provides a method for treating such conditions or diseases in a subject by introducing nucleic acid or cell-based therapeutics containing the modified nucleic acids provided herein, wherein the modified nucleic acids encode for a protein that replaces the protein activity missing from the target cells of the subject. Specific examples of a dysfunctional protein are the nonsense mutation variants of the cystic fibrosis transmembrane conductance regulator (CFTR) gene, which produce a nonfunctional protein variant of CFTR protein, which causes cystic fibrosis.

[0321] Thus, provided are methods of treating cystic fibrosis in a mammalian subject by contacting a cell of the subject with a modified nucleic acid having a translatable region that encodes a functional CFTR polypeptide, under conditions such that an effective amount of the CTFR polypeptide is present in the cell. Preferred target cells are epithelial, endothelial and mesothelial cells, such as the lung, and methods of administration are determined in view of the target tissue; i.e., for lung delivery, the RNA molecules are formulated for administration by inhalation.

[0322] In another embodiment, the present invention provides a method for treating hyperlipidemia in a subject, by introducing into a cell population of the subject with a modified mRNA molecule encoding Sortilin, a protein recently characterized by genomic studies, thereby ameliorating the hyperlipidemia in a subject. The SORT1 gene encodes a trans-Golgi network (TGN) transmembrane protein called Sortilin. Genetic studies have shown that one of five individuals has a single nucleotide polymorphism, rs12740374, in the 1p13 locus of the SORT1 gene that predisposes them to having low levels of low-density lipoprotein (LDL) and very-low-density lipoprotein (VLDL). Each copy of the minor allele, present in about 30% of people, alters LDL cholesterol by 8 mg/dL, while two copies of the minor allele, present in about 5% of the population, lowers LDL cholesterol 16 mg/dL. Carriers of the minor allele have also been shown to have a 40% decreased risk of myocardial infarction. Functional in vivo studies in mice describes that overexpression of SORT1 in mouse liver tissue led to significantly lower LDL-cholesterol levels, as much as 80% lower, and that silencing SORT1 increased LDL cholesterol approximately 200% (Musunuru K et al. From noncoding variant to phenotype via SORT1 at the 1p13 cholesterol locus. Nature 2010; 466: 714-721; herein incorporated by reference in its entirety).

### Modulation of Cell Fate

[0323] Provided are methods of inducing an alteration in cell fate in a target mammalian cell. The target mammalian cell may be a precursor cell and the alteration may involve driving differentiation into a lineage, or blocking such differentiation. Alternatively, the target mammalian cell may be a differentiated cell, and the cell fate alteration includes driving de-differentiation into a pluripotent precursor cell, or blocking such de-differentiation, such as the dedifferentiation of cancer cells into cancer stem cells. In situations where a change in cell fate is desired, effective amounts of mRNAs encoding a cell fate inductive polypeptide is introduced into a target cell under conditions such that an alteration in cell fate is induced. In some embodiments, the modified mRNAs are useful to reprogram a subpopulation of cells from a first phenotype to a second phenotype. Such a reprogramming may be temporary or permanent.

[0324] Optionally, the reprogramming induces a target cell to adopt an intermediate phenotype.

[0325] Additionally, the methods of the present invention are particularly useful to generate induced pluripotent stem cells (iPS cells) because of the high efficiency of transfection, the ability to re-transfect cells, and the tenability of the amount of recombinant polypeptides produced in the target cells. Further, the use of iPS cells generated using the methods described herein is expected to have a reduced incidence of teratoma formation.

[0326] Also provided are methods of reducing cellular differentiation in a target cell population. For example, a target cell population containing one or more precursor cell types is contacted with a composition having an effective amount of a modified mRNA encoding a polypeptide, under conditions such that the polypeptide is translated and reduces the differentiation of the precursor cell. In non-limiting embodiments, the target cell population contains injured tissue in a mammalian subject or tissue affected by a surgical procedure. The precursor cell is, e.g., a stromal precursor cell, a neural precursor cell, or a mesenchymal precursor cell.

[0327] In a specific embodiment, provided are modified nucleic acids that encode one or more differentiation factors Gata4, Mef2c and Tbx4. These mRNA-generated factors are introduced into fibroblasts and drive the reprogramming into cardiomyocytes. Such a reprogramming can be performed in vivo, by contacting an mRNA-containing patch or other material to damaged cardiac tissue to facilitate cardiac regeneration. Such a process promotes cardiomyocyte genesis as opposed to fibrosis.

### Targeting of Pathogenic Organisms; Purification of Biological Materials

[0328] Provided herein are methods for targeting pathogenic microorganisms, such as bacteria, yeast, protozoa, helminthes and the like, using modified mRNAs that encode cytostatic or cytotoxic polypeptides. Preferably the mRNA introduced into the target pathogenic organism contains modified nucleosides or other nucleic acid sequence modifications that the mRNA is translated exclusively, or preferentially, in the target pathogenic organism, to reduce possible off-target effects of the therapeutic. Such methods are useful for removing pathogenic organisms from biological material, including blood, semen, eggs, and transplant materials including embryos, tissues, and organs.

### Targeting Diseased Cells

[0329] Provided herein are methods for targeting pathogenic or diseased cells, particularly cancer cells, using modified mRNAs that encode cytostatic or cytotoxic polypeptides. Preferably the mRNA introduced into the target pathogenic cell contains modified nucleosides or other nucleic acid sequence modifications that the mRNA is translated exclusively, or preferentially, in the target pathogenic cell, to reduce possible off-target effects of the therapeutic. Alternatively, the invention provides targeting moieties that are capable of targeting the modified mRNAs to preferentially bind to and enter the target pathogenic cell.

### Protein Production

[0330] The methods provided herein are useful for enhancing protein product yield in a cell culture process. In a cell culture containing a plurality of host cells, introduction of the modified mRNAs described herein results in increased protein production efficiency relative to a corresponding unmodified nucleic acid. Such increased protein production efficiency can be demonstrated, e.g., by showing increased cell transfection, increased protein translation from the nucleic acid, decreased nucleic acid degradation, and/or reduced innate immune response of the host cell. Protein production can be measured by ELISA, and protein activity can be measured by various functional assays known in the art. The protein production may be generated in a continuous or a fed-batch mammalian process.

[0331] Additionally, it is useful to optimize the expression of a specific polypeptide in a cell line or collection of cell lines of potential interest, particularly an engineered protein such as a protein variant of a reference protein having a known activity. In one embodiment, provided is a method of optimizing expression of an engineered protein in a target cell, by providing a plurality of target cell types, and independently contacting with each of the plurality of target cell types a modified mRNA encoding an engineered polypeptide. Additionally, culture conditions may be altered to increase protein production efficiency. Subsequently, the presence and/or level of the engineered polypeptide in the plurality of target cell types is detected and/or quantitated, allowing for the optimization of an engineered polypeptide's expression by selection of an efficient target cell and cell culture conditions relating thereto. Such methods are particularly useful when the engineered polypeptide contains one or more post-translational modifications or has substantial tertiary structure, situations which often complicate efficient protein production.

### Gene Silencing

[0332] The modified mRNAs described herein are useful to silence (i.e., prevent or substantially reduce) expression of one or more target genes in a cell population. A modified mRNA encoding a polypeptide capable of directing sequence-specific histone H3 methylation is introduced into the cells in the population under conditions such that the polypeptide is translated and reduces gene transcription of a target gene via histone H3 methylation and subsequent heterochromatin formation. In some embodiments, the silencing mechanism is performed on a cell population present in a mammalian subject. By way of non-limiting example, a useful target gene is a mutated Janus Kinase-2 family member, wherein the mammalian subject expresses the mutant target gene suffers from a myeloproliferative disease resulting from aberrant kinase activity.

[0333] Co-administration of modified mRNAs and siRNAs are also provided herein. As demonstrated in yeast, sequence-specific trans silencing is an effective mechanism for altering cell function. Fission yeast require two RNAi complexes for siRNA-mediated heterochromatin assembly: the RNA-induced transcriptional silencing (RITS) complex and the RNA-directed RNA polymerase complex (RDRC) (Motamedi et al. Cell 2004, 119, 789-802; herein incorporated by reference in its entirety). In fission yeast, the RITS complex contains the siRNA binding Argonaute family protein Ago1, a chromodomain protein Chp1, and Tas3. The fission yeast RDRC complex is composed of an RNA-dependent RNA Polymerase Rdp1, a putative RNA helicase Hrr1, and a polyA polymerase family protein Cid12. These two complexes require the Dicer ribonuclease and Clr4 histone H3 methyltransferase for activity. Together, Ago1 binds siRNA molecules generated through Dicer-mediated cleavage of Rdp1 co-transcriptionally generated dsRNA transcripts and allows for the sequence-specific direct association of Chp1, Tas3, Hrr1, and Clr4 to regions of DNA destined for methylation and histone modification and subsequent compaction into transcriptionally silenced heterochromatin. While this mechanism functions in cis- with centromeric regions of DNA, sequence-specific trans silencing is possible through co-transfection with double-stranded siRNAs for specific regions of DNA and concomitant RNAi-directed silencing of the siRNA ribonuclease Eri1 (Buhler et al. Cell 2006, 125, 873-886; herein incorporated by reference in its entirety).

### Modulation of Biological Pathways

[0334] The rapid translation of modified mRNAs introduced into cells provides a desirable mechanism of modulating target biological pathways. Such modulation includes antagonism or agonism of a given pathway. In one embodiment, a method is provided for antagonizing a biological pathway in a cell by contacting the cell with an effective amount of a composition comprising a modified nucleic acid encoding a recombinant polypeptide, under conditions such that the nucleic acid is localized into the cell and the recombinant polypeptide is capable of being translated in the cell from the nucleic acid, wherein the recombinant polypeptide inhibits the activity of a polypeptide functional in the biological pathway. Exemplary biological pathways are those defective in an autoimmune or inflammatory disorder such as multiple sclerosis, rheumatoid arthritis, psoriasis, lupus erythematosus, ankylosing spondylitis colitis, or Crohn's disease; in particular, antagonism of the IL-12 and IL-23 signaling pathways are of particular utility. (See Kikly K, Liu L, Na S, Sedgwick J D (2006) Curr. Opin. Immunol. 18 (6): 670-5; herein incorporated by reference in its entirety).

[0335] Further, provided are modified nucleic acids encoding an antagonist for chemokine receptors; chemokine receptors CXCR-4 and CCR-5 are required for, e.g., HIV entry into host cells (Arenzana-Seisdedos F et al, (1996) Nature. October 3; 383(6599):400; herein incorporated by reference in its entirety).

[0336] Alternatively, provided are methods of agonizing a biological pathway in a cell by contacting the cell with an effective amount of a modified nucleic acid encoding a recombinant polypeptide under conditions such that the nucleic acid is localized into the cell and the recombinant polypeptide is capable of being translated in the cell from the nucleic acid, and the recombinant polypeptide induces the activity of a polypeptide functional in the biological pathway. Exemplary agonized biological pathways include pathways that modulate cell fate determination. Such agonization is reversible or, alternatively, irreversible.

### Cellular Nucleic Acid Delivery

[0337] Methods of the present invention enhance nucleic acid delivery into a cell population, in vivo, ex vivo, or in culture. For example, a cell culture containing a plurality of host cells (e.g., eukaryotic cells such as yeast or mammalian cells) is contacted with a composition that contains an enhanced nucleic acid having at least one nucleoside modification and, optionally, a translatable region. The composition also generally contains a transfection reagent or other compound that increases the efficiency of enhanced nucleic acid uptake into the host cells. The enhanced nucleic acid exhibits enhanced retention in the cell population, relative to a corresponding unmodified nucleic acid. The retention of the enhanced nucleic acid is greater than the retention of the unmodified nucleic acid. In some embodiments, it is at least about 50%, 75%, 90%, 95%, 100%, 150%, 200% or more than 200% greater than the retention of the unmodified nucleic acid. Such retention advantage may be achieved by one round of transfection with the enhanced nucleic acid, or may be obtained following repeated rounds of transfection.

[0338] In some embodiments, the enhanced nucleic acid is delivered to a target cell population with one or more additional nucleic acids. Such delivery may be at the same time, or the enhanced nucleic acid is delivered prior to delivery of the one or more additional nucleic acids. The additional one or more nucleic acids may be modified nucleic acids or unmodified nucleic acids. It is understood that the initial presence of the enhanced nucleic acids does not substantially induce an innate immune response of the cell population and, moreover, that the innate immune response will not be activated by the later presence of the unmodified nucleic acids. In this regard, the enhanced nucleic acid may not itself contain a translatable region, if the protein desired to be present in the target cell population is translated from the unmodified nucleic acids.

### Expression of Ligand or Receptor on Cell Surface

[0339] In some aspects and embodiments of the aspects described herein, the modified RNAs can be used to express a ligand or ligand receptor on the surface of a cell (e.g., a homing moiety). A ligand or ligand receptor moiety attached to a cell surface can permit the cell to have a desired biological interaction with a tissue or an agent in vivo. A ligand can be an antibody, an antibody fragment, an aptamer, a peptide, a vitamin, a carbohydrate, a protein or polypeptide, a receptor, e.g., cell-surface receptor, an adhesion molecule, a glycoprotein, a sugar residue, a therapeutic agent, a drug, a glycosaminoglycan, or any combination thereof. For example, a ligand can be an antibody that recognizes a cancer-cell specific antigen, rendering the cell capable of preferentially interacting with tumor cells to permit tumor-specific localization of a modified cell. A ligand can confer the ability of a cell composition to accumulate in a tissue to be treated, since a preferred ligand may be capable of interacting with a target molecule on the external face of a tissue to be treated. Ligands having limited cross-reactivity to other tissues are generally preferred.

[0340] In some cases, a ligand can act as a homing moiety which permits the cell to target to a specific tissue or interact with a specific ligand. Such homing moieties can include, but are not limited to, any member of a specific binding pair, antibodies, monoclonal antibodies, or derivatives or analogs thereof, including without limitation: Fv fragments, single chain Fv (scFv) fragments, Fab′ fragments, F(ab′)2 fragments, single domain antibodies, camelized antibodies and antibody fragments, humanized antibodies and antibody fragments, and multivalent versions of the foregoing; multivalent binding reagents including without limitation: monospecific or bispecific antibodies, such as disulfide stabilized Fv fragments, scFv tandems ((SCFV)2 fragments), diabodies, tribodies or tetrabodies, which typically are covalently linked or otherwise stabilized (i.e., leucine zipper or helix stabilized) scFv fragments; and other homing moieties include for example, aptamers, receptors, and fusion proteins.

[0341] In some embodiments, the homing moiety may be a surface-bound antibody, which can permit tuning of cell targeting specificity. This is especially useful since highly specific antibodies can be raised against an epitope of interest for the desired targeting site. In one embodiment, multiple antibodies are expressed on the surface of a cell, and each antibody can have a different specificity for a desired target. Such approaches can increase the avidity and specificity of homing interactions.

[0342] A skilled artisan can select any homing moiety based on the desired localization or function of the cell, for example an estrogen receptor ligand, such as tamoxifen, can target cells to estrogen-dependent breast cancer cells that have an increased number of estrogen receptors on the cell surface. Other non-limiting examples of ligand/receptor interactions include CCRI (e.g., for treatment of inflamed joint tissues or brain in rheumatoid arthritis, and/or multiple sclerosis), CCR7, CCR8 (e.g., targeting to lymph node tissue), CCR6, CCR9, CCR10 (e.g., to target to intestinal tissue), CCR4, CCR10 (e.g., for targeting to skin), CXCR4 (e.g., for general enhanced transmigration), HCELL (e.g., for treatment of inflammation and inflammatory disorders, bone marrow), Alpha4beta7 (e.g., for intestinal mucosa targeting), VLA-4/VCAM-1 (e.g., targeting to endothelium). In general, any receptor involved in targeting (e.g., cancer metastasis) can be harnessed for use in the methods and compositions described herein.

### Mediators of Cell Death

[0343] In one embodiment, a modified nucleic acid molecule composition can be used to induce apoptosis in a cell (e.g., a cancer cell) by increasing the expression of a death receptor, a death receptor ligand or a combination thereof. This method can be used to induce cell death in any desired cell and has particular usefulness in the treatment of cancer where cells escape natural apoptotic signals.

[0344] Apoptosis can be induced by multiple independent signaling pathways that converge upon a final effector mechanism consisting of multiple interactions between several “death receptors” and their ligands, which belong to the tumor necrosis factor (TNF) receptor/ligand superfamily. The best-characterized death receptors are CD95 (“Fas”), TNFRI (p55), death receptor 3 (DR3 or Apo3/TRAMO), DR4 and DR5 (apo2-TRAIL-R2). The final effector mechanism of apoptosis may be the activation of a series of proteinases designated as caspases. The activation of these caspases results in the cleavage of a series of vital cellular proteins and cell death. The molecular mechanism of death receptors/ligands-induced apoptosis is well known in the art. For example, Fas/FasL-mediated apoptosis is induced by binding of three FasL molecules which induces trimerization of Fas receptor via C-terminus death domains (DDs), which in turn recruits an adapter protein FADD (Fas-associated protein with death domain) and Caspase-8. The oligomerization of this trimolecular complex, Fas/FAIDD/caspase-8, results in proteolytic cleavage of proenzyme caspase-8 into active caspase-8 that, in turn, initiates the apoptosis process by activating other downstream caspases through proteolysis, including caspase-3. Death ligands in general are apoptotic when formed into trimers or higher order of structures. As monomers, they may serve as antiapoptotic agents by competing with the trimers for binding to the death receptors.

[0345] In one embodiment, the modified nucleic acid molecule composition encodes for a death receptor (e.g., Fas, TRAIL, TRAMO, TNFR, TLR etc). Cells made to express a death receptor by transfection of modified RNA become susceptible to death induced by the ligand that activates that receptor. Similarly, cells made to express a death ligand, e.g., on their surface, will induce death of cells with the receptor when the transfected cell contacts the target cell. In another embodiment, the modified RNA composition encodes for a death receptor ligand (e.g., FasL, TNF, etc). In another embodiment, the modified RNA composition encodes a caspase (e.g., caspase 3, caspase 8, caspase 9 etc). Where cancer cells often exhibit a failure to properly differentiate to a non-proliferative or controlled proliferative form, in another embodiment, the synthetic, modified RNA composition encodes for both a death receptor and its appropriate activating ligand. In another embodiment, the synthetic, modified RNA composition encodes for a differentiation factor that when expressed in the cancer cell, such as a cancer stem cell, will induce the cell to differentiate to a non-pathogenic or nonself-renewing phenotype (e.g., reduced cell growth rate, reduced cell division etc) or to induce the cell to enter a dormant cell phase (e.g., Go resting phase).

[0346] One of skill in the art will appreciate that the use of apoptosis-inducing techniques may require that the modified nucleic acid molecules are appropriately targeted to e.g., tumor cells to prevent unwanted wide-spread cell death. Thus, one can use a delivery mechanism (e.g., attached ligand or antibody, targeted liposome etc) that recognizes a cancer antigen such that the modified nucleic acid molecules are expressed only in cancer cells.

### Exemplary Properties of Modified Nucleic Acid Molecules

### Major Groove Interacting Partners

[0347] The modified nucleic acid molecules, e.g., modified mRNA (mmRNA), described herein can disrupt interactions with recognition receptors that detect and respond to RNA ligands through interactions, e.g. binding, with the major groove face of a nucleotide or nucleic acid. As such, RNA ligands comprising modified nucleotides or nucleic acids such as the modified RNAs as described herein decrease interactions with major groove binding partners, and therefore decrease an innate immune response or expression and secretion of pro-inflammatory cytokines, or both.

[0348] Example major groove interacting, e.g. binding, partners include, but are not limited to the following nucleases and helicases. Within membranes, TLRs (Toll-like Receptors) 3, 7, and 8 can respond to single- and double-stranded RNAs. Within the cytoplasm, members of the superfamily 2 class of DEX(D/H) helicases and ATPases can sense RNAs to initiate antiviral responses. These helicases include the RIG-I (retinoic acid-inducible gene I) and MDA5 (melanoma differentiation-associated gene 5). Other examples include laboratory of genetics and physiology 2 (LGP2), HIN-200 domain containing proteins, or Helicase-domain containing proteins.

### Polypeptide Variants

[0349] Provided are nucleic acids that encode variant polypeptides, which have a certain identity with a reference polypeptide sequence. The term “identity” as known in the art, refers to a relationship between the sequences of two or more peptides, as determined by comparing the sequences. In the art, “identity” also means the degree of sequence relatedness between peptides, as determined by the number of matches between strings of two or more amino acid residues.

[0350] “Identity” measures the percent of identical matches between the smaller of two or more sequences with gap alignments (if any) addressed by a particular mathematical model or computer program (i.e., “algorithms”). Identity of related peptides can be readily calculated by known methods. Such methods include, but are not limited to, those described in Computational Molecular Biology, Lesk, A. M., ed., Oxford University Press, New York, 1988; Biocomputing: Informatics and Genome Projects, Smith, D. W., ed., Academic Press, New York, 1993; Computer Analysis of Sequence Data, Part 1, Griffin, A. M., and Griffin, H. G., eds., Humana Press, New Jersey, 1994; Sequence Analysis in Molecular Biology, von Heinje, G., Academic Press, 1987; Sequence Analysis Primer, Gribskov, M. and Devereux, J., eds., M. Stockton Press, New York, 1991; and Carillo et al., SIAM J. Applied Math. 48, 1073 (1988); all of which are herein incorporated by reference in their entirety.

[0351] In some embodiments, the polypeptide variant has the same or a similar activity as the reference polypeptide. Alternatively, the variant has an altered activity (e.g., increased or decreased) relative to a reference polypeptide. Generally, variants of a particular polynucleotide or polypeptide of the invention will have at least about 40%, 45%, 50%, 55%, 60%, 65%, 70%, 75%, 80%, 85%, 90%, 91%, 92%, 93%, 94%, 95%, 96%, 97%, 98%, 99% or more sequence identity to that particular reference polynucleotide or polypeptide as determined by sequence alignment programs and parameters described herein and known to those skilled in the art.

[0352] As recognized by those skilled in the art, protein fragments, functional protein domains, and homologous proteins are also considered to be within the scope of this invention. For example, provided herein is any protein fragment of a reference protein (meaning a polypeptide sequence at least one amino acid residue shorter than a reference polypeptide sequence but otherwise identical) 10, 20, 30, 40, 50, 60, 70, 80, 90, 100 or greater than 100 amino acids in length. In another example, any protein that includes a stretch of about 20, about 30, about 40, about 50, or about 100 amino acids which are about 40%, about 50%, about 60%, about 70%, about 80%, about 90%, about 95%, or about 100% identical to any of the sequences described herein can be utilized in accordance with the invention. In certain embodiments, a protein sequence to be utilized in accordance with the invention includes 2, 3, 4, 5, 6, 7, 8, 9, 10, or more mutations as shown in any of the sequences provided or referenced herein.

### Polypeptide Libraries

[0353] Also provided are polynucleotide libraries containing nucleoside modifications, wherein the polynucleotides individually contain a first nucleic acid sequence encoding a polypeptide, such as an antibody, protein binding partner, scaffold protein, and other polypeptides known in the art. Preferably, the polynucleotides are mRNA in a form suitable for direct introduction into a target cell host, which in turn synthesizes the encoded polypeptide.

[0354] In certain embodiments, multiple variants of a protein, each with different amino acid modification(s), are produced and tested to determine the best variant in terms of pharmacokinetics, stability, biocompatibility, and/or biological activity, or a biophysical property such as expression level. Such a library may contain 10, 10², 10³, 10⁴, 10⁵, 10⁶, 10⁷, 10⁸, 10⁹, or over 10⁹ possible variants (including substitutions, deletions of one or more residues, and insertion of one or more residues).

### Polypeptide-Nucleic Acid Complexes

[0355] Proper protein translation involves the physical aggregation of a number of polypeptides and nucleic acids associated with the mRNA. Provided by the invention are complexes containing conjugates of protein and nucleic acids, containing a translatable mRNA having one or more nucleoside modifications (e.g., at least two different nucleoside modifications) and one or more polypeptides bound to the mRNA. Generally, the proteins are provided in an amount effective to prevent or reduce an innate immune response of a cell into which the complex is introduced.

### Targeting Moieties

[0356] In embodiments of the invention, modified nucleic acids are provided to express a protein-binding partner or a receptor on the surface of the cell, which functions to target the cell to a specific tissue space or to interact with a specific moiety, either in vivo or in vitro. Suitable protein-binding partners include antibodies and functional fragments thereof, scaffold proteins, or peptides. Additionally, modified nucleic acids can be employed to direct the synthesis and extracellular localization of lipids, carbohydrates, or other biological moieties.

[0357] As described herein, a useful feature of the modified nucleic acids of the invention is the capacity to reduce the innate immune response of a cell to an exogenous nucleic acid. Provided are methods for performing the titration, reduction or elimination of the immune response in a cell or a population of cells. In some embodiments, the cell is contacted with a first composition that contains a first dose of a first exogenous nucleic acid including a translatable region and at least one nucleoside modification, and the level of the innate immune response of the cell to the first exogenous nucleic acid is determined. Subsequently, the cell is contacted with a second composition, which includes a second dose of the first exogenous nucleic acid, the second dose containing a lesser amount of the first exogenous nucleic acid as compared to the first dose.

[0358] Alternatively, the cell is contacted with a first dose of a second exogenous nucleic acid. The second exogenous nucleic acid may contain one or more modified nucleosides, which may be the same or different from the first exogenous nucleic acid or, alternatively, the second exogenous nucleic acid may not contain modified nucleosides. The steps of contacting the cell with the first composition and/or the second composition may be repeated one or more times.

[0359] Additionally, efficiency of protein production (e.g., protein translation) in the cell is optionally determined, and the cell may be re-transfected with the first and/or second composition repeatedly until a target protein production efficiency is achieved.

[0360] As described herein, provided are mRNAs having sequences that are substantially not translatable. Such mRNA may be effective as a vaccine when administered to a subject. It is further provided that the subject administered the vaccine may be a mammal, more preferably a human and most preferably a patient.

[0361] Also provided are modified nucleic acids that contain one or more noncoding regions. Such modified nucleic acids are generally not translated, but are capable of binding to and sequestering one or more translational machinery component such as a ribosomal protein or a transfer RNA (tRNA), thereby effectively reducing protein expression in the cell. The modified nucleic acid may contain a small nucleolar RNA (sno-RNA), micro RNA (miRNA), small interfering RNA (siRNA) or Piwi-interacting RNA (piRNA).

### Activation of the Immune Response: Vaccines

[0362] In one embodiment of the present invention, mRNA molecules may be used to elicit or provoke an immune response in an organism. The mRNA molecules to be delivered may encode an immunogenic peptide or polypeptide and may encode more than one such peptide or polypeptide.

[0363] Additionally, certain modified nucleosides, or combinations thereof, when introduced into modified nucleic acids activate the innate immune response. Such activating modified nucleic acids, e.g., modified RNAs, are useful as adjuvants when combined with polypeptide or other vaccines. In certain embodiments, the activated modified mRNAs contain a translatable region which encodes for a polypeptide sequence useful as a vaccine, thus providing the ability to be a self-adjuvant.

[0364] In one embodiment, the modified nucleic acid molecules and/or mmRNA of the invention may encode an immunogen. The delivery of modified nucleic acid molecules and/or mmRNA encoding an immunogen may activate the immune response. As a non-limiting example, the modified nucleic acid molecules and/or mmRNA encoding an immunogen may be delivered to cells to trigger multiple innate response pathways (see International Pub. No. WO2012006377; herein incorporated by reference in its entirety). As another non-limiting example, the modified nucleic acid molecules and mmRNA of the present invention encoding an immunogen may be delivered to a vertebrate in a dose amount large enough to be immunogenic to the vertebrate (see International Pub. No. WO2012006372 and WO2012006369; each of which is herein incorporated by reference in their entirety).

[0365] The modified nucleic acid molecules or mmRNA of invention may encode a polypeptide sequence for a vaccine and may further comprise an inhibitor. The inhibitor may impair antigen presentation and/or inhibit various pathways known in the art. As a non-limiting example, the modified nucleic acid molecules or mmRNA of the invention may be used for a vaccine in combination with an inhibitor which can impair antigen presentation (see International Pub. No. WO2012089225 and WO2012089338; each of which is herein incorporated by reference in their entirety).

[0366] In one embodiment, the modified nucleic acid molecules or mmRNA of the invention may be self-replicating RNA. Self-replicating RNA molecules can enhance efficiency of RNA delivery and expression of the enclosed gene product. In one embodiment, the modified nucleic acid molecules or mmRNA may comprise at least one modification described herein and/or known in the art. In one embodiment, the self-replicating RNA can be designed so that the self-replicating RNA does not induce production of infectious viral particles. As a non-limiting example the self-replicating RNA may be designed by the methods described in US Pub. No. US20110300205 and International Pub. No. WO2011005799, each of which is herein incorporated by reference in their entirety.

[0367] In one embodiment, the self-replicating modified nucleic acid molecules or mmRNA of the invention may encode a protein which may raise the immune response. As a non-limiting example, the modified nucleic acid molecules and/or mmRNA may be self-replicating mRNA may encode at least one antigen (see US Pub. No. US20110300205 and International Pub. No. WO2011005799; each of which is herein incorporated by reference in their entirety).

[0368] In one embodiment, the self-replicating modified nucleic acids or mmRNA of the invention may be formulated using methods described herein or known in the art. As a non-limiting example, the self-replicating RNA may be formulated for delivery by the methods described in Geall et al (Nonviral delivery of self-amplifying RNA vaccines, PNAS 2012; PMID: 22908294; herein incorporated by reference in its entirety).

[0369] In one embodiment, the modified nucleic acid molecules or mmRNA of the present invention may encode amphipathic and/or immunogenic amphipathic peptides.

[0370] In on embodiment, a formulation of the modified nucleic acid molecules or mmRNA of the present invention may further comprise an amphipathic and/or immunogenic amphipathic peptide. As a non-limiting example, the modified nucleic acid molecule or mmRNA comprising an amphipathic and/or immunogenic amphipathic peptide may be formulated as described in US. Pub. No. US20110250237 and International Pub. Nos. WO2010009277 and WO2010009065; each of which is herein incorporated by reference in their entirety.

[0371] In one embodiment, the modified nucleic acid molecules and mmRNA of the present invention may be immunostimulatory. As a non-limiting example, the modified nucleic acid molecules and mmRNA may encode all or a part of a positive-sense or a negative-sense stranded RNA virus genome (see International Pub No. WO2012092569 and US Pub No. US20120177701, each of which is herein incorporated by reference in their entirety). In another non-limiting example, the immunostimulatory modified nucleic acid molecules or mmRNA of the present invention may be formulated with an excipient for administration as described herein and/or known in the art (see International Pub No. WO2012068295 and US Pub No. US20120213812, each of which is herein incorporated by reference in their entirety).

[0372] In one embodiment, the response of the vaccine formulated by the methods described herein may be enhanced by the addition of various compounds to induce the therapeutic effect. As a non-limiting example, the vaccine formulation may include a MHC II binding peptide or a peptide having a similar sequence to a MHC II binding peptide (see International Pub Nos. WO2012027365, WO2011031298 and US Pub No. US20120070493, US20110110965, each of which is herein incorporated by reference in their entirety). As another example, the vaccine formulations may comprise modified nicotinic compounds which may generate an antibody response to nicotine residue in a subject (see International Pub No. WO2012061717 and US Pub No. US20120114677, each of which is herein incorporated by reference in their entirety).

### Pharmaceutical Compositions

### Formulation, Administration, Delivery and Dosing

[0373] The present invention provides modified nucleic acids and mmRNA compositions and complexes in combination with one or more pharmaceutically acceptable excipients. Pharmaceutical compositions may optionally comprise one or more additional active substances, e.g. therapeutically and/or prophylactically active substances. General considerations in the formulation and/or manufacture of pharmaceutical agents may be found, for example, in Remington: The Science and Practice of Pharmacy 21^{st} ed., Lippincott Williams & Wilkins, 2005 (incorporated herein by reference in its entirety).

[0374] In some embodiments, compositions are administered to humans, human patients or subjects. For the purposes of the present disclosure, the phrase “active ingredient” generally refers to modified nucleic acids and mmRNA to be delivered as described herein.

[0375] Although the descriptions of pharmaceutical compositions provided herein are principally directed to pharmaceutical compositions which are suitable for administration to humans, it will be understood by the skilled artisan that such compositions are generally suitable for administration to animals of all sorts. Modification of pharmaceutical compositions suitable for administration to humans in order to render the compositions suitable for administration to various animals is well understood, and the ordinarily skilled veterinary pharmacologist can design and/or perform such modification with merely ordinary, if any, experimentation. Subjects to which administration of the pharmaceutical compositions is contemplated include, but are not limited to, humans and/or other primates; mammals, including commercially relevant mammals such as cattle, pigs, horses, sheep, cats, dogs, mice, and/or rats; and/or birds, including commercially relevant birds such as chickens, ducks, geese, and/or turkeys.

[0376] Formulations of the pharmaceutical compositions described herein may be prepared by any method known or hereafter developed in the art of pharmacology. In general, such preparatory methods include the step of bringing the active ingredient into association with an excipient and/or one or more other accessory ingredients, and then, if necessary and/or desirable, shaping and/or packaging the product into a desired single- or multi-dose unit.

[0377] A pharmaceutical composition in accordance with the invention may be prepared, packaged, and/or sold in bulk, as a single unit dose, and/or as a plurality of single unit doses. As used herein, a “unit dose” is discrete amount of the pharmaceutical composition comprising a predetermined amount of the active ingredient. The amount of the active ingredient is generally equal to the dosage of the active ingredient which would be administered to a subject and/or a convenient fraction of such a dosage such as, for example, one-half or one-third of such a dosage.

[0378] The present invention provides modified nucleic acid molecules, and complexes containing modified nucleic acids associated with other deliverable moieties. Thus, the present invention provides pharmaceutical compositions comprising one or more modified nucleic acids, or one or more such complexes, and one or more pharmaceutically acceptable excipients. Pharmaceutical compositions may optionally comprise one or more additional therapeutically active substances. In some embodiments, compositions are administered to humans.

[0379] Relative amounts of the active ingredient, the pharmaceutically acceptable excipient, and/or any additional ingredients in a pharmaceutical composition in accordance with the invention will vary, depending upon the identity, size, and/or condition of the subject treated and further depending upon the route by which the composition is to be administered. By way of example, the composition may comprise between 0.1% and 100% (w/w) e.g., between 0.5 and 50%, between 1-30%, between 5-80%, at least 80% (w/w) active ingredient.

[0380] In one embodiment, provided are formulations containing an effective amount of a modified nucleic acid (e.g., an mRNA) engineered to avoid an innate immune response of a cell into which the modified nucleic acid enters. The modified nucleic acid generally includes a nucleotide sequence encoding a polypeptide of interest.

[0381] When administered to a subject the pharmaceutical compositions described herein may provide proteins which have been generated from modified mRNAs. Pharmaceutical compositions may optionally comprise one or more additional therapeutically active substances. In accordance with some embodiments, a method of administering pharmaceutical compositions comprising one or more proteins to be delivered to a subject in need thereof is provided. In some embodiments, compositions are administered to human subjects. In a further embodiment, the compositions are administered to a subject who is a patient.

[0382] In one embodiment, the pharmaceutical compositions described herein can include one or more pharmaceutically acceptable carriers.

### Formulations

[0383] The modified nucleic acid, and mmRNA of the invention can be formulated using one or more excipients to: (1) increase stability; (2) increase cell transfection; (3) permit the sustained or delayed release (e.g., from a depot formulation of the modified nucleic acid, or mmRNA); (4) alter the biodistribution (e.g., target the modified nucleic acid, or mmRNA to specific tissues or cell types); (5) increase the translation of encoded protein in vivo; and/or (6) alter the release profile of encoded protein in vivo. In addition to traditional excipients such as any and all solvents, dispersion media, diluents, or other liquid vehicles, dispersion or suspension aids, surface active agents, isotonic agents, thickening or emulsifying agents, preservatives, excipients of the present invention can include, without limitation, lipidoids, liposomes, lipid nanoparticles, polymers, lipoplexes, core-shell nanoparticles, peptides, proteins, cells transfected with modified nucleic acid, or mmRNA (e.g., for transplantation into a subject), hyaluronidase, nanoparticle mimics and combinations thereof. Accordingly, the formulations of the invention can include one or more excipients, each in an amount that together increases the stability of the modified nucleic acid, or mmRNA, increases cell transfection by the modified nucleic acid, or mmRNA, increases the expression of modified nucleic acid, or mmRNA encoded protein, and/or alters the release profile of modified nucleic acid, or mmRNA encoded proteins. Further, the modified nucleic acids and mmRNA of the present invention may be formulated using self-assembled nucleic acid nanoparticles.

[0384] Formulations of the pharmaceutical compositions described herein may be prepared by any method known or hereafter developed in the art of pharmacology. In general, such preparatory methods include the step of associating the active ingredient with an excipient and/or one or more other accessory ingredients.

[0385] Formulations which may be used in the present invention may be prepared as described in PCT/US2012/68714; the contents of which are herein incorporated by reference in its entirety.

[0386] A pharmaceutical composition in accordance with the present disclosure may be prepared, packaged, and/or sold in bulk, as a single unit dose, and/or as a plurality of single unit doses. As used herein, a “unit dose” refers to a discrete amount of the pharmaceutical composition comprising a predetermined amount of the active ingredient. The amount of the active ingredient may generally be equal to the dosage of the active ingredient which would be administered to a subject and/or a convenient fraction of such a dosage including, but not limited to, one-half or one-third of such a dosage.

[0387] Relative amounts of the active ingredient, the pharmaceutically acceptable excipient, and/or any additional ingredients in a pharmaceutical composition in accordance with the present disclosure may vary, depending upon the identity, size, and/or condition of the subject being treated and further depending upon the route by which the composition is to be administered. For example, the composition may comprise between 0.1% and 99% (w/w) of the active ingredient.

[0388] In some embodiments, the modified mRNA formulations described herein may contain at least one modified mRNA. The formulations may contain 1, 2, 3, 4 or 5 modified mRNA. In one embodiment, the formulation contains at least three modified mRNA encoding proteins. In one embodiment, the formulation contains at least five modified mRNA encoding proteins.

[0389] Pharmaceutical formulations may additionally comprise a pharmaceutically acceptable excipient, which, as used herein, includes, but is not limited to, any and all solvents, dispersion media, diluents, or other liquid vehicles, dispersion or suspension aids, surface active agents, isotonic agents, thickening or emulsifying agents, preservatives, and the like, as suited to the particular dosage form desired. Various excipients for formulating pharmaceutical compositions and techniques for preparing the composition are known in the art (see Remington: The Science and Practice of Pharmacy, 21^{st} Edition, A. R. Gennaro, Lippincott, Williams & Wilkins, Baltimore, Md., 2006; incorporated herein by reference in its entirety). The use of a conventional excipient medium may be contemplated within the scope of the present disclosure, except insofar as any conventional excipient medium may be incompatible with a substance or its derivatives, such as by producing any undesirable biological effect or otherwise interacting in a deleterious manner with any other component(s) of the pharmaceutical composition.

[0390] In some embodiments, the particle size of the lipid nanoparticle may be increased and/or decreased. The change in particle size may be able to help counter biological reaction such as, but not limited to, inflammation or may increase the biological effect of the modified mRNA delivered to mammals.

[0391] In one embodiment, modified mRNA for use in the present invention may be formulated as described in PCT/US2012/69610, the contents of which are herein incorporated by reference in its entirety.

[0392] Pharmaceutically acceptable excipients used in the manufacture of pharmaceutical compositions include, but are not limited to, inert diluents, surface active agents and/or emulsifiers, preservatives, buffering agents, lubricating agents, and/or oils. Such excipients may optionally be included in the pharmaceutical formulations of the invention.

[0393] In certain embodiments, the formulations include one or more cell penetration agents, e.g., transfection agents. In one specific embodiment, a ribonucleic acid is mixed or admixed with a transfection agent (or mixture thereof) and the resulting mixture is employed to transfect cells. Preferred transfection agents are cationic lipid compositions, particularly monovalent and polyvalent cationic lipid compositions, more particularly LIPOFECTIN®, LIPOFECTACE, LIPOFECTAMINE®, CELLFECTIN®, DMRIE-C, DMRIE, DOTAP, DOSPA, and DOSPER, and dendrimer compositions, particularly G5-G10 dendrimers, including dense star dendrimers, PAMAM dendrimers, grafted dendrimers, and dendrimers known as dendrigrafts and “SUPERFECT.” In a second specific transfection method, a ribonucleic acid is conjugated to a nucleic acid-binding group, for example a polyamine and more particularly a spermine, which is then introduced into the cell or admixed with a transfection agent (or mixture thereof) and the resulting mixture is employed to transfect cells. In a third specific embodiment, a mixture of one or more transfection-enhancing peptides, proteins, or protein fragments, including fusagenic peptides or proteins, transport or trafficking peptides or proteins, receptor-ligand peptides or proteins, or nuclear localization peptides or proteins and/or their modified analogs (e.g., spermine modified peptides or proteins) or combinations thereof are mixed with and complexed with a ribonucleic acid to be introduced into a cell, optionally being admixed with transfection agent and the resulting mixture is employed to transfect cells. Further, a component of a transfection agent (e.g., lipids, cationic lipids or dendrimers) is covalently conjugated to selected peptides, proteins, or protein fragments directly or via a linking or spacer group. Of particular interest in this embodiment are peptides or proteins that are fusagenic, membrane-permeabilizing, transport or trafficking, or which function for cell-targeting. The peptide- or protein-transfection agent complex is combined with a ribonucleic acid and employed for transfection.

### Lipidoids

[0394] The synthesis of lipidoids has been extensively described and formulations containing these compounds are particularly suited for delivery of modified nucleic acid molecules or mmRNA (see Mahon et al., Bioconjug Chem. 2010 21:1448-1454; Schroeder et al., J Intern Med. 2010 267:9-21; Akinc et al., Nat Biotechnol. 2008 26:561-569; Love et al., Proc Natl Acad Sci USA. 2010 107:1864-1869; Siegwart et al., Proc Natl Acad Sci USA. 2011 108:12996-3001; all of which are incorporated herein in their entireties).

[0395] While these lipidoids have been used to effectively deliver double stranded small interfering RNA molecules in rodents and non-human primates (see Akinc et al., Nat Biotechnol. 2008 26:561-569; Frank-Kamenetsky et al., Proc Natl Acad Sci USA. 2008 105:11915-11920; Akinc et al., Mol Ther. 2009 17:872-879; Love et al., Proc Natl Acad Sci USA. 2010 107:1864-1869; Leuschner et al., Nat Biotechnol. 2011 29:1005-1010; all of which is incorporated herein in their entirety), the present disclosure describes their formulation and use in delivering single stranded modified nucleic acid molecules or mmRNA. Complexes, micelles, liposomes or particles can be prepared containing these lipidoids and therefore, can result in an effective delivery of the modified nucleic acid molecules or mmRNA, as judged by the production of an encoded protein, following the injection of a lipidoid formulation via localized and/or systemic routes of administration. Lipidoid complexes of modified nucleic acid molecules or mmRNA can be administered by various means including, but not limited to, intravenous, intramuscular, or subcutaneous routes.

[0396] In vivo delivery of nucleic acids may be affected by many parameters, including, but not limited to, the formulation composition, nature of particle PEGylation, degree of loading, oligonucleotide to lipid ratio, and biophysical parameters such as, but not limited to, particle size (Akinc et al., Mol Ther. 2009 17:872-879; herein incorporated by reference in its entirety). As an example, small changes in the anchor chain length of poly(ethylene glycol) (PEG) lipids may result in significant effects on in vivo efficacy. Formulations with the different lipidoids, including, but not limited to penta[3-(1-laurylaminopropionyl)]-triethylenetetramine hydrochloride (TETA-5LAP; aka 98N12-5, see Murugaiah et al., Analytical Biochemistry, 401:61 (2010); herein incorporated by reference in its entirety), C12-200 (including derivatives and variants), and MD1, can be tested for in vivo activity.

[0397] The lipidoid referred to herein as “98N12-5” is disclosed by Akinc et al., Mol Ther. 2009 17:872-879 and is incorporated by reference in its entirety.

[0398] The lipidoid referred to herein as “C12-200” is disclosed by Love et al., Proc Natl Acad Sci USA. 2010 107:1864-1869 and Liu and Huang, Molecular Therapy. 2010 669-670; both of which are herein incorporated by reference in their entirety. The lipidoid formulations can include particles comprising either 3 or 4 or more components in addition to modified nucleic acid molecules or mmRNA. As an example, formulations with certain lipidoids, include, but are not limited to, 98N12-5 and may contain 42% lipidoid, 48% cholesterol and 10% PEG (C14 alkyl chain length). As another example, formulations with certain lipidoids, include, but are not limited to, C12-200 and may contain 50% lipidoid, 10% disteroylphosphatidyl choline, 38.5% cholesterol, and 1.5% PEG-DMG.

[0399] In one embodiment, a modified nucleic acid molecule or mmRNA formulated with a lipidoid for systemic intravenous administration can target the liver. For example, a final optimized intravenous formulation using modified nucleic acid molecule or mmRNA, and comprising a lipid molar composition of 42% 98N12-5, 48% cholesterol, and 10% PEG-lipid with a final weight ratio of about 7.5 to 1 total lipid to modified nucleic acid, or mmRNA, and a C14 alkyl chain length on the PEG lipid, with a mean particle size of roughly 50-60 nm, can result in the distribution of the formulation to be greater than 90% to the liver. (see, Akinc et al., Mol Ther. 2009 17:872-879; herein incorporated by reference in its entirety). In another example, an intravenous formulation using a C12-200 (see U.S. provisional application 61/175,770 and published international application WO2010129709, each of which is herein incorporated by reference in their entirety) lipidoid may have a molar ratio of 50/10/38.5/1.5 of C12-200/disteroylphosphatidyl choline/cholesterol/PEG-DMG, with a weight ratio of 7 to 1 total lipid to modified nucleic acid molecule or mmRNA, and a mean particle size of 80 nm may be effective to deliver modified nucleic acid molecule or mmRNA to hepatocytes (see, Love et al., Proc Natl Acad Sci USA. 2010 107:1864-1869 herein incorporated by reference in its entirety). In another embodiment, an MD1 lipidoid-containing formulation may be used to effectively deliver modified nucleic acid molecule or mmRNA to hepatocytes in vivo. The characteristics of optimized lipidoid formulations for intramuscular or subcutaneous routes may vary significantly depending on the target cell type and the ability of formulations to diffuse through the extracellular matrix into the blood stream. While a particle size of less than 150 nm may be desired for effective hepatocyte delivery due to the size of the endothelial fenestrae (see, Akinc et al., Mol Ther. 2009 17:872-879 herein incorporated by reference in its entirety), use of a lipidoid-formulated modified nucleic acid molecules or mmRNA to deliver the formulation to other cells types including, but not limited to, endothelial cells, myeloid cells, and muscle cells may not be similarly size-limited. Use of lipidoid formulations to deliver siRNA in vivo to other non-hepatocyte cells such as myeloid cells and endothelium has been reported (see Akinc et al., Nat Biotechnol. 2008 26:561-569; Leuschner et al., Nat Biotechnol. 2011 29:1005-1010; Cho et al. Adv. Funct. Mater. 2009 19:3112-3118; 8^{th} International Judah Folkman Conference, Cambridge, Mass. Oct. 8-9, 2010; each of which is herein incorporated by reference in its entirety). Effective delivery to myeloid cells, such as monocytes, lipidoid formulations may have a similar component molar ratio. Different ratios of lipidoids and other components including, but not limited to, disteroylphosphatidyl choline, cholesterol and PEG-DMG, may be used to optimize the formulation of the modified nucleic acid, or mmRNA for delivery to different cell types including, but not limited to, hepatocytes, myeloid cells, muscle cells, etc. For example, the component molar ratio may include, but is not limited to, 50% C12-200, 10% disteroylphosphatidyl choline, 38.5% cholesterol, and %1.5 PEG-DMG (see Leuschner et al., Nat Biotechnol 2011 29:1005-1010; herein incorporated by reference in its entirety). The use of lipidoid formulations for the localized delivery of nucleic acids to cells (such as, but not limited to, adipose cells and muscle cells) via either subcutaneous or intramuscular delivery, may not require all of the formulation components desired for systemic delivery, and as such may comprise only the lipidoid and the modified nucleic acid molecule or mmRNA.

[0400] Combinations of different lipidoids may be used to improve the efficacy of modified nucleic acid molecule or mmRNA directed protein production as the lipidoids may be able to increase cell transfection by the modified nucleic acid molecule or mmRNA; and/or increase the translation of encoded protein (see Whitehead et al., Mol. Ther. 2011, 19:1688-1694, herein incorporated by reference in its entirety).

[0401] In certain embodiments, the formulation may include at least a modified nucleic acid and a delivery agent. In some embodiments, the delivery agent may comprise lipidoid-based formulations allowed for localized and systemic delivery of mmRNA.

[0402] The pharmaceutical compositions described herein include lipidoid-based formulations allowing for the localized and systemic delivery of mmRNA.

### Liposomes, Lipoplexes, and Lipid Nanoparticles

[0403] The modified nucleic acid molecules and mmRNA of the invention can be formulated using one or more liposomes, lipoplexes, or lipid nanoparticles. In one embodiment, pharmaceutical compositions of modified nucleic acid molecule or mmRNA include liposomes. Liposomes are artificially-prepared vesicles which may primarily be composed of a lipid bilayer and may be used as a delivery vehicle for the administration of nutrients and pharmaceutical formulations. Liposomes can be of different sizes such as, but not limited to, a multilamellar vesicle (MLV) which may be hundreds of nanometers in diameter and may contain a series of concentric bilayers separated by narrow aqueous compartments, a small unicellular vesicle (SUV) which may be smaller than 50 nm in diameter, and a large unilamellar vesicle (LUV) which may be between 50 and 500 nm in diameter. Liposome design may include, but is not limited to, opsonins or ligands in order to improve the attachment of liposomes to unhealthy tissue or to activate events such as, but not limited to, endocytosis. Liposomes may contain a low or a high pH in order to improve the delivery of the pharmaceutical formulations.

[0404] The formation of liposomes may depend on the physicochemical characteristics such as, but not limited to, the pharmaceutical formulation entrapped and the liposomal ingredients, the nature of the medium in which the lipid vesicles are dispersed, the effective concentration of the entrapped substance and its potential toxicity, any additional processes involved during the application and/or delivery of the vesicles, the optimization size, polydispersity and the shelf-life of the vesicles for the intended application, and the batch-to-batch reproducibility and possibility of large-scale production of safe and efficient liposomal products.

[0405] In one embodiment, pharmaceutical compositions described herein may include, without limitation, liposomes such as those formed from 1,2-dioleyloxy-N,N-dimethylaminopropane (DODMA) liposomes, DiLa2 liposomes from Marina Biotech (Bothell, Wash.), 1,2-dilinoleyloxy-3-dimethylaminopropane (DLin-DMA), 2,2-dilinoleyl-4-(2-dimethylaminoethyl)-[1,3]-dioxolane (DLin-KC2-DMA), and MC3 (US20100324120; herein incorporated by reference in its entirety) and liposomes which may deliver small molecule drugs such as, but not limited to, DOXIL® from Janssen Biotech, Inc. (Horsham, Pa.). In one embodiment, pharmaceutical compositions described herein may include, without limitation, liposomes such as those formed from the synthesis of stabilized plasmid-lipid particles (SPLP) or stabilized nucleic acid lipid particle (SNALP) that have been previously described and shown to be suitable for oligonucleotide delivery in vitro and in vivo (see Wheeler et al. Gene Therapy. 1999 6:271-281; Zhang et al. Gene Therapy. 1999 6:1438-1447; Jeffs et al. Pharm Res. 2005 22:362-372; Morrissey et al., Nat Biotechnol. 2005 2:1002-1007; Zimmermann et al., Nature. 2006 441:111-114; Heyes et al. J Contr Rel. 2005 107:276-287; Semple et al. Nature Biotech. 2010 28:172-176; Judge et al. J Clin Invest. 2009 119:661-673; deFougerolles Hum Gene Ther. 2008 19:125-132; all of which are incorporated herein in their entireties.) The original manufacture method by Wheeler et al. was a detergent dialysis method, which was later improved by Jeffs et al. and is referred to as the spontaneous vesicle formation method. The liposome formulations are composed of 3 to 4 lipid components in addition to the modified nucleic acid molecule or mmRNA. As an example a liposome can contain, but is not limited to, 55% cholesterol, 20% disteroylphosphatidyl choline (DSPC), 10% PEG-S-DSG, and 15% 1,2-dioleyloxy-N,N-dimethylaminopropane (DODMA), as described by Jeffs et al. As another example, certain liposome formulations may contain, but are not limited to, 48% cholesterol, 20% DSPC, 2% PEG-c-DMA, and 30% cationic lipid, where the cationic lipid can be 1,2-distearloxy-N,N-dimethylaminopropane (DSDMA), DODMA, DLin-DMA, or 1,2-dilinolenyloxy-3-dimethylaminopropane (DLenDMA), as described by Heyes et al.

[0406] In one embodiment, pharmaceutical compositions may include liposomes which may be formed to deliver mmRNA which may encode at least one immunogen. The mmRNA may be encapsulated by the liposome and/or it may be contained in an aqueous core which may then be encapsulated by the liposome (see International Pub. Nos. WO2012031046, WO2012031043, WO2012030901 and WO2012006378; each of which is herein incorporated by reference in their entirety). In another embodiment, the mmRNA which may encode an immunogen may be formulated in a cationic oil-in-water emulsion where the emulsion particle comprises an oil core and a cationic lipid which can interact with the mmRNA anchoring the molecule to the emulsion particle (see International Pub. No. WO2012006380; herein incorporated by reference in its entirety). In yet another embodiment, the lipid formulation may include at least cationic lipid, a lipid which may enhance transfection and a least one lipid which contains a hydrophilic head group linked to a lipid moiety (International Pub. No. WO2011076807 and U.S. Pub. No. 20110200582; each of which is herein incorporated by reference in their entirety). In another embodiment, the modified mRNA encoding an immunogen may be formulated in a lipid vesicle which may have crosslinks between functionalized lipid bilayers (see U.S. Pub. No. 20120177724, herein incorporated by reference in its entirety).

[0407] In one embodiment, the modified mRNA may be formulated in a lipid vesicle which may have crosslinks between functionalized lipid bilayers.

[0408] In one embodiment, the modified mRNA may be formulated in a lipid-polycation complex. The formation of the lipid-polycation complex may be accomplished by methods known in the art and/or as described in U.S. Pub. No. 20120178702, herein incorporated by reference in its entirety. As a non-limiting example, the polycation may include a cationic peptide or a polypeptide such as, but not limited to, polylysine, polyornithine and/or polyarginine and the cationic peptides described in International Pub. No. WO2012013326; herein incorporated by reference in its entirety. In another embodiment, the modified mRNA may be formulated in a lipid-polycation complex which may further include a neutral lipid such as, but not limited to, cholesterol or dioleoyl phosphatidylethanolamine (DOPE).

[0409] The liposome formulation may be influenced by, but not limited to, the selection of the cationic lipid component, the degree of cationic lipid saturation, the nature of the PEGylation, ratio of all components and biophysical parameters such as size. In one example by Semple et al. (Semple et al. Nature Biotech. 2010 28:172-176; herein incorporated by reference in its entirety), the liposome formulation was composed of 57.1% cationic lipid, 7.1% dipalmitoylphosphatidylcholine, 34.3% cholesterol, and 1.4% PEG-c-DMA. As another example, changing the composition of the cationic lipid could more effectively deliver siRNA to various antigen presenting cells (Basha et al. Mol Ther. 2011 19:2186-2200; herein incorporated by reference in its entirety).

[0410] In some embodiments, the ratio of PEG in the lipid nanoparticle (LNP) formulations may be increased or decreased and/or the carbon chain length of the PEG lipid may be modified from C14 to C18 to alter the pharmacokinetics and/or biodistribution of the LNP formulations. As a non-limiting example, LNP formulations may contain 1-5% of the lipid molar ratio of PEG-c-DOMG as compared to the cationic lipid, DSPC and cholesterol. In another embodiment the PEG-c-DOMG may be replaced with a PEG lipid such as, but not limited to, PEG-DSG (1,2-Distearoyl-sn-glycerol, methoxypolyethylene glycol) or PEG-DPG (1,2-Dipalmitoyl-sn-glycerol, methoxypolyethylene glycol). The cationic lipid may be selected from any lipid known in the art such as, but not limited to, DLin-MC3-DMA, DLin-DMA, C12-200 and DLin-KC2-DMA.

[0411] In one embodiment, the cationic lipid may be selected from, but not limited to, a cationic lipid described in International Publication Nos. WO2012040184, WO2011153120, WO2011149733, WO2011090965, WO2011043913, WO2011022460, WO2012061259, WO2012054365, WO2012044638, WO2010080724, WO201021865 and WO2008103276, U.S. Pat. Nos. 7,893,302, 7,404,969 and 8,283,333 and US Patent Publication No. US20100036115 and US20120202871; each of which is herein incorporated by reference in their entirety. In another embodiment, the cationic lipid may be selected from, but not limited to, formula A described in International Publication Nos. WO2012040184, WO2011153120, WO2011149733, WO2011090965, WO2011043913, WO2011022460, WO2012061259, WO2012054365 and WO2012044638; each of which is herein incorporated by reference in their entirety. In yet another embodiment, the cationic lipid may be selected from, but not limited to, formula CLI-CLXXIX of International Publication No. WO2008103276, formula CLI-CLXXIX of U.S. Pat. No. 7,893,302, formula CLI-CLXXXXII of U.S. Pat. No. 7,404,969 and formula I-VI of US Patent Publication No. US20100036115; each of which is herein incorporated by reference in their entirety. As a non-limiting example, the cationic lipid may be selected from (20Z,23Z)—N,N-dimethylnonacosa-20,23-dien-10-amine, (17Z,20Z)—N,N-dimemylhexacosa-17,20-dien-9-amine, (1Z,19Z)—N5N-dimethylpentacosa-16,19-dien-8-amine, (13Z,16Z)—N,N-dimethyldocosa-13,16-dien-5-amine, (12Z,15Z)—N,N-dimethylhenicosa-12,15-dien-4-amine, (14Z,17Z)—N,N-dimethyltricosa-14,17-dien-6-amine, (15Z,18Z)—N,N-dimethyltetracosa-15,18-dien-7-amine, (18Z,21Z)—N,N-dimethylheptacosa-18,21-dien-10-amine, (15Z,18Z)—N,N-dimethyltetracosa-15,18-dien-5-amine, (14Z,17Z)—N,N-dimethyltricosa-14,17-dien-4-amine, (19Z,22Z)—N,N-dimeihyloctacosa-19,22-dien-9-amine, (18Z,21 Z)—N,N-dimethylheptacosa-18,21-dien-8-amine, (17Z,20Z)—N,N-dimethylhexacosa-17,20-dien-7-amine, (16Z,19Z)—N,N-dimethylpentacosa-16,19-dien-6-amine, (22Z,25Z)—N,N-dimethylhentriaconta-22,25-dien-10-amine, (21 Z,24Z)—N,N-dimethyltriaconta-21,24-dien-9-amine, (18Z)—N,N-dimetylheptacos-18-en-10-amine, (17Z)—N,N-dimethylhexacos-17-en-9-amine, (19Z,22Z)—N,N-dimethyloctacosa-19,22-dien-7-amine, N,N-dimethylheptacosan-10-amine, (20Z,23Z)—N-ethyl-N-methylnonacosa-20,23-dien-10-amine, 1-[(11Z,14Z)-1-nonylicosa-11,14-dien-1-yl]pyrrolidine, (20Z)—N,N-dimethylheptacos-20-en-10-amine, (15Z)—N,N-dimethyl eptacos-15-en-10-amine, (14Z)—N,N-dimethylnonacos-14-en-10-amine, (17Z)—N,N-dimethylnonacos-17-en-10-amine, (24Z)—N,N-dimethyltritriacont-24-en-10-amine, (20Z)—N,N-dimethylnonacos-20-en-10-amine, (22Z)—N,N-dimethylhentriacont-22-en-10-amine, (16Z)—N,N-dimethylpentacos-16-en-8-amine, (12Z,15Z)—N,N-dimethyl-2-nonylhenicosa-12,15-dien-1-amine, (13Z,16Z)—N,N-dimethyl-3-nonyldocosa-13,16-dien-1-amine, N,N-dimethyl-1-[(1S,2R)-2-octylcyclopropyl]eptadecan-8-amine, 1-[(1S,2R)-2-hexylcyclopropyl]-N,N-dimethylnonadecan-10-amine, N,N-dimethyl-1-[(1S,2R)-2-octylcyclopropyl]nonadecan-10-amine, N,N-dimethyl-21-[(1S,2R)-2-octylcyclopropyl]henicosan-10-amine, N,N-dimethyl-1-[(1S,2S)-2-{[(1R,2R)-2-pentylcyclopropyl]methyl}cyclopropyl]nonadecan-10-amine, N,N-dimethyl-1-[(1S,2R)-2-octylcyclopropyl]hexadecan-8-amine, N,N-dimethyl-[(1R,2S)-2-undecylcyclopropyl]tetradecan-5-amine, N,N-dimethyl-3-{7-[(1S,2R)-2-octylcyclopropyl]heptyl}dodecan-1-amine, 1-[(1R,2S)-2-heptylcyclopropyl]-N,N-dimethyloctadecan-9-amine, 1-[(1S,2R)-2-decylcyclopropyl]-N,N-dimethylpentadecan-6-amine, N,N-dimethyl-1-[(1S,2R)-2-octylcyclopropyl]pentadecan-8-amine, R—N,N-dimethyl-1-[(9Z,12Z)-octadeca-9,12-dien-1-yloxy]-3-(octyloxy)propan-2-amine, S—N,N-dimethyl-1-[(9Z,12Z)-octadeca-9,12-dien-1-yloxy]-3-(octyloxy)propan-2-amine, 1-{2-[(9Z,12Z)-octadeca-9,12-dien-1-yloxy]-1-[(octyloxy)methyl]ethyl}pyrrolidine, (2S)—N,N-dimethyl-1-[(9Z,12Z)-octadeca-9,12-dien-1-yloxy]-3-[(5Z)-oct-5-en-1-yloxy]propan-2-amine, 1-{2-[(9Z,12Z)-octadeca-9,12-dien-1-yloxy]-1-[(octyloxy)methyl]ethyl}azetidine, (2S)-1-(hexyloxy)-N,N-dimethyl-3-[(9Z,12Z)-octadeca-9,12-dien-1-yloxy]propan-2-amine, (2S)-1-(heptyloxy)-N,N-dimethyl-3-[(9Z,12Z)-octadeca-9,12-dien-1-yloxy]propan-2-amine, N,N-dimethyl-1-(nonyloxy)-3-[(9Z,12Z)-octadeca-9,12-dien-1-yloxy]propan-2-amine, N,N-dimethyl-1-[(9Z)-octadec-9-en-1-yloxy]-3-(octyloxy)propan-2-amine; (2S)—N,N-dimethyl-1-[(6Z,9Z,12Z)-octadeca-6,9,12-trien-1-yloxy]-3-(octyloxy)propan-2-amine, (2S)-1-[(11Z,14Z)-icosa-11,14-dien-1-yloxy]-N,N-dimethyl-3-(pentyloxy)propan-2-amine, (2S)-1-(hexyloxy)-3-[(11Z,14Z)-icosa-11,14-dien-1-yloxy]-N,N-dimethylpropan-2-amine, 1-[(11Z,14Z)-icosa-11,14-dien-1-yloxy]-N,N-dimethyl-3-(octyloxy)propan-2-amine, 1-[(13Z,16Z)-docosa-13,16-dien-1-yloxy]-N,N-dimethyl-3-(octyloxy)propan-2-amine, (2S)-1-[(13Z,16Z)-docosa-13,16-dien-1-yloxy]-3-(hexyloxy)-N,N-dimethylpropan-2-amine, (2S)-1-[(13Z)-docos-13-en-1-yloxy]-3-(hexyloxy)-N,N-dimethylpropan-2-amine, 1-[(13Z)-docos-13-en-1-yloxy]-N,N-dimethyl-3-(octyloxy)propan-2-amine, 1-[(9Z)-hexadec-9-en-1-yloxy]-N,N-dimethyl-3-(octyloxy)propan-2-amine, (2R)—N,N-dimethyl-H(1-metoyloctyl)oxy]-3-[(9Z,12Z)-octadeca-9,12-dien-1-yloxy]propan-2-amine, (2R)-1-[(3,7-dimethyloctyl)oxy]-N,N-dimethyl-3-[(9Z,12Z)-octadeca-9,12-dien-1-yloxy]propan-2-amine, N,N-dimethyl-1-(octyloxy)-3-({8-[(1S,2S)-2-{[(1R,2R)-2-pentylcyclopropyl]methyl}cyclopropyl]octyl}oxy)propan-2-amine, N,N-dimethyl-1-{[8-(2-oclylcyclopropyl)octyl]oxy}-3-(octyloxy)propan-2-amine and (11E,20Z,23Z)—N,N-dimethylnonacosa-11,20,2-trien-10-amine or a pharmaceutically acceptable salt or stereoisomer thereof

[0412] In one embodiment, the cationic lipid may be synthesized by methods known in the art and/or as described in International Publication Nos. WO2012040184, WO2011153120, WO2011149733, WO2011090965, WO2011043913, WO2011022460, WO2012061259, WO2012054365, WO2012044638, WO2010080724 and WO201021865; each of which is herein incorporated by reference in their entirety.

[0413] In one embodiment, the LNP formulation may contain PEG-c-DOMG at 3% lipid molar ratio. In another embodiment, the LNP formulation may contain PEG-c-DOMG at 1.5% lipid molar ratio.

[0414] In one embodiment, the LNP formulation may contain PEG-DMG 2000 (1,2-dimyristoyl-sn-glycero-3-phophoethanolamine-N-[methoxy(polyethylene glycol)-2000). In one embodiment, the LNP formulation may contain PEG-DMG 2000, a cationic lipid known in the art and at least one other component. In another embodiment, the LNP formulation may contain PEG-DMG 2000, a cationic lipid known in the art, DSPC and cholesterol. As a non-limiting example, the LNP formulation may contain PEG-DMG 2000, DLin-DMA, DSPC and cholesterol. As another non-limiting example the LNP formulation may contain PEG-DMG 2000, DLin-DMA, DSPC and cholesterol in a molar ratio of 2:40:10:48 (see e.g. Geall et al., Nonviral delivery of self-amplifying RNA vaccines, PNAS 2012; PMID: 22908294; herein incorporated by reference in its entirety).

[0415] In one embodiment, the LNP formulation may be formulated by the methods described in International Publication Nos. WO2011127255 or WO2008103276, each of which is herein incorporated by reference in their entirety. As a non-limiting example, modified RNA described herein may be encapsulated in LNP formulations as described in WO2011127255 and/or WO2008103276; each of which is herein incorporated by reference in their entirety. As another non-limiting example, modified RNA described herein may be formulated in a nanoparticle to be delivered by a parenteral route as described in U.S. Pub. No. 20120207845; herein incorporated by reference in its entirety.

[0416] In one embodiment, LNP formulations described herein may comprise a polycationic composition. As a non-limiting example, the polycationic composition may be selected from formula 1-60 of US Patent Publication No. US20050222064; herein incorporated by reference in its entirety. In another embodiment, the LNP formulations comprising a polycationic composition may be used for the delivery of the modified RNA described herein in vivo and/or in vitro.

[0417] In one embodiment, the LNP formulations described herein may additionally comprise a permeability enhancer molecule. Non-limiting permeability enhancer molecules are described in US Patent Publication No. US20050222064; herein incorporated by reference in its entirety.

[0418] In one embodiment, the pharmaceutical compositions may be formulated in liposomes such as, but not limited to, DiLa2 liposomes (Marina Biotech, Bothell, Wash.), SMARTICLES® (Marina Biotech, Bothell, Wash.), neutral DOPC (1,2-dioleoyl-sn-glycero-3-phosphocholine) based liposomes (e.g., siRNA delivery for ovarian cancer (Landen et al. Cancer Biology & Therapy 2006 5(12)1708-1713); herein incorporated by reference in its entirety) and hyaluronan-coated liposomes (Quiet Therapeutics, Israel).

[0419] The nanoparticle formulations may be a carbohydrate nanoparticle comprising a carbohydrate carrier and a modified nucleic acid molecule (e.g., mmRNA). As a non-limiting example, the carbohydrate carrier may include, but is not limited to, an anhydride-modified phytoglycogen or glycogen-type material, phytoglycogen octenyl succinate, phytoglycogen beta-dextrin, anhydride-modified phytoglycogen beta-dextrin. (See e.g., International Publication No. WO2012109121; herein incorporated by reference in its entirety).

[0420] Lipid nanoparticle formulations may be improved by replacing the cationic lipid with a biodegradable cationic lipid which is known as a rapidly eliminated lipid nanoparticle (reLNP). Ionizable cationic lipids, such as, but not limited to, DLinDMA, DLin-KC2-DMA, and DLin-MC3-DMA, have been shown to accumulate in plasma and tissues over time and may be a potential source of toxicity. The rapid metabolism of the rapidly eliminated lipids can improve the tolerability and therapeutic index of the lipid nanoparticles by an order of magnitude from a 1 mg/kg dose to a 10 mg/kg dose in rat. Inclusion of an enzymatically degraded ester linkage can improve the degradation and metabolism profile of the cationic component, while still maintaining the activity of the reLNP formulation. The ester linkage can be internally located within the lipid chain or it may be terminally located at the terminal end of the lipid chain. The internal ester linkage may replace any carbon in the lipid chain.

[0421] In one embodiment, the internal ester linkage may be located on either side of the saturated carbon. Non-limiting examples of reLNPs include,

[chemical structure]

[0422] In one embodiment, an immune response may be elicited by delivering a lipid nanoparticle which may include a nanospecies, a polymer and an immunogen. (U.S. Publication No. 20120189700 and International Publication No. WO2012099805; each of which is herein incorporated by reference in their entirety). The polymer may encapsulate the nanospecies or partially encapsulate the nanospecies. The immunogen may be a recombinant protein, a modified RNA described herein. In one embodiment, the lipid nanoparticle may be formulated for use in a vaccine such as, but not limited to, against a pathogen.

[0423] Lipid nanoparticles may be engineered to alter the surface properties of particles so the lipid nanoparticles may penetrate the mucosal barrier. Mucus is located on mucosal tissue such as, but not limited to, oral (e.g., the buccal and esophageal membranes and tonsil tissue), ophthalmic, gastrointestinal (e.g., stomach, small intestine, large intestine, colon, rectum), nasal, respiratory (e.g., nasal, pharyngeal, tracheal and bronchial membranes), genital (e.g., vaginal, cervical and urethral membranes). Nanoparticles larger than 10-200 nm which are preferred for higher drug encapsulation efficiency and the ability to provide the sustained delivery of a wide array of drugs have been thought to be too large to rapidly diffuse through mucosal barriers. Mucus is continuously secreted, shed, discarded or digested and recycled so most of the trapped particles may be removed from the mucosal tissue within seconds or within a few hours. Large polymeric nanoparticles (200 nm-500 nm in diameter) which have been coated densely with a low molecular weight polyethylene glycol (PEG) diffused through mucus only 4 to 6-fold lower than the same particles diffusing in water (Lai et al. PNAS 2007 104(5):1482-487; Lai et al. Adv Drug Deliv Rev. 2009 61(2): 158-171; each of which is herein incorporated by reference in their entirety). The transport of nanoparticles may be determined using rates of permeation and/or fluorescent microscopy techniques including, but not limited to, fluorescence recovery after photobleaching (FRAP) and high resolution multiple particle tracking (MPT). As a non-limiting example, compositions which can penetrate a mucosal barrier may be made as described in U.S. Pat. No. 8,241,670, herein incorporated by reference in its entirety.

[0424] The lipid nanoparticle engineered to penetrate mucus may comprise a polymeric material (i.e. a polymeric core) and/or a polymer-vitamin conjugate and/or a tri-block co-polymer. The polymeric material may include, but is not limited to, polyamines, polyethers, polyamides, polyesters, polycarbamates, polyureas, polycarbonates, poly(styrenes), polyimides, polysulfones, polyurethanes, polyacetylenes, polyethylenes, polyethyeneimines, polyisocyanates, polyacrylates, polymethacrylates, polyacrylonitriles, and polyarylates. The polymeric material may be biodegradable and/or biocompatible. The polymeric material may additionally be irradiated. As a non-limiting example, the polymeric material may be gamma irradiated (See e.g., International App. No. WO201282165, herein incorporated by reference in its entirety). Non-limiting examples of specific polymers include poly(caprolactone) (PCL), ethylene vinyl acetate polymer (EVA), poly(lactic acid) (PLA), poly(L-lactic acid) (PLLA), poly(glycolic acid) (PGA), poly(lactic acid-co-glycolic acid) (PLGA), poly(L-lactic acid-co-glycolic acid) (PLLGA), poly(D,L-lactide) (PDLA), poly(L-lactide) (PLLA), poly(D,L-lactide-co-caprolactone), poly(D,L-lactide-co-caprolactone-co-glycolide), poly(D,L-lactide-co-PEO-co-D,L-lactide), poly(D,L-lactide-co-PPO-co-D,L-lactide), polyalkyl cyanoacralate, polyurethane, poly-L-lysine (PLL), hydroxypropyl methacrylate (HPMA), polyethyleneglycol, poly-L-glutamic acid, poly(hydroxy acids), polyanhydrides, polyorthoesters, poly(ester amides), polyamides, poly(ester ethers), polycarbonates, polyalkylenes such as polyethylene and polypropylene, polyalkylene glycols such as poly(ethylene glycol) (PEG), polyalkylene oxides (PEO), polyalkylene terephthalates such as poly(ethylene terephthalate), polyvinyl alcohols (PVA), polyvinyl ethers, polyvinyl esters such as poly(vinyl acetate), polyvinyl halides such as poly(vinyl chloride) (PVC), polyvinylpyrrolidone, polysiloxanes, polystyrene (PS), polyurethanes, derivatized celluloses such as alkyl celluloses, hydroxyalkyl celluloses, cellulose ethers, cellulose esters, nitro celluloses, hydroxypropylcellulose, carboxymethylcellulose, polymers of acrylic acids, such as poly(methyl(meth)acrylate) (PMMA), poly(ethyl(meth)acrylate), poly(butyl(meth)acrylate), poly(isobutyl(meth)acrylate), poly(hexyl(meth)acrylate), poly(isodecyl(meth)acrylate), poly(lauryl(meth)acrylate), poly(phenyl(meth)acrylate), poly(methyl acrylate), poly(isopropyl acrylate), poly(isobutyl acrylate), poly(octadecyl acrylate) and copolymers and mixtures thereof, polydioxanone and its copolymers, polyhydroxyalkanoates, polypropylene fumarate, polyoxymethylene, poloxamers, poly(ortho)esters, poly(butyric acid), poly(valeric acid), poly(lactide-co-caprolactone), and trimethylene carbonate, polyvinylpyrrolidone. The lipid nanoparticle may be coated or associated with a co-polymer such as, but not limited to, a block co-polymer, and (poly(ethylene glycol))-(poly(propylene oxide))-(poly(ethylene glycol)) triblock copolymer (see e.g., US Publication 20120121718 and US Publication 20100003337 and U.S. Pat. No. 8,263,665; each of which is herein incorporated by reference in their entirety). The co-polymer may be a polymer that is generally regarded as safe (GRAS) and the formation of the lipid nanoparticle may be in such a way that no new chemical entities are created. For example, the lipid nanoparticle may comprise poloxamers coating PLGA nanoparticles without forming new chemical entities which are still able to rapidly penetrate human mucus (Yang et al. Angew. Chem. Int. Ed. 2011 50:2597-2600; herein incorporated by reference in its entirety).

[0425] The vitamin of the polymer-vitamin conjugate may be vitamin E. The vitamin portion of the conjugate may be substituted with other suitable components such as, but not limited to, vitamin A, vitamin E, other vitamins, cholesterol, a hydrophobic moiety, or a hydrophobic component of other surfactants (e.g., sterol chains, fatty acids, hydrocarbon chains and alkylene oxide chains).

[0426] The lipid nanoparticle engineered to penetrate mucus may include surface altering agents such as, but not limited to, mmRNA, anionic proteins (e.g., bovine serum albumin), surfactants (e.g., cationic surfactants such as for example dimethyldioctadecyl-ammonium bromide), sugars or sugar derivatives (e.g., cyclodextrin), nucleic acids, polymers (e.g., heparin, polyethylene glycol and poloxamer), mucolytic agents (e.g., N-acetylcysteine, mugwort, bromelain, papain, clerodendrum, acetylcysteine, bromhexine, carbocisteine, eprazinone, mesna, ambroxol, sobrerol, domiodol, letosteine, stepronin, tiopronin, gelsolin, thymosin β4 dornase alfa, neltenexine, erdosteine) and various DNases including rhDNase. The surface altering agent may be embedded or enmeshed in the particle's surface or disposed (e.g., by coating, adsorption, covalent linkage, or other process) on the surface of the lipid nanoparticle. (see e.g., US Publication 20100215580 and US Publication 20080166414; each of which is herein incorporated by reference in their entirety).

[0427] The mucus penetrating lipid nanoparticles may comprise at least one mmRNA described herein. The mmRNA may be encapsulated in the lipid nanoparticle and/or disposed on the surface of the particle. The mmRNA may be covalently coupled to the lipid nanoparticle. Formulations of mucus penetrating lipid nanoparticles may comprise a plurality of nanoparticles. Further, the formulations may contain particles which may interact with the mucus and alter the structural and/or adhesive properties of the surrounding mucus to decrease mucoadhesion which may increase the delivery of the mucus penetrating lipid nanoparticles to the mucosal tissue.

[0428] In one embodiment, the modified nucleic acid molecule or mmRNA is formulated as a lipoplex, such as, without limitation, the ATUPLEX™ system, the DACC system, the DBTC system and other siRNA-lipoplex technology from Silence Therapeutics (London, United Kingdom), STEMFECT™ from STEMGENT® (Cambridge, Mass.), and polyethylenimine (PEI) or protamine-based targeted and non-targeted delivery of nucleic acids (Aleku et al. Cancer Res. 2008 68:9788-9798; Strumberg et al. Int J Clin Pharmacol Ther 2012 50:76-78; Santel et al., Gene Ther 2006 13:1222-1234; Santel et al., Gene Ther 2006 13:1360-1370; Gutbier et al., Pulm Pharmacol. Ther. 2010 23:334-344; Kaufmann et al. Microvasc Res 2010 80:286-293 Weide et al. J Immunother. 2009 32:498-507; Weide et al. J Immunother. 2008 31:180-188; Pascolo Expert Opin. Biol. Ther. 4:1285-1294; Fotin-Mleczek et al., 2011 J. Immunother. 34:1-15; Song et al., Nature Biotechnol. 2005, 23:709-717; Peer et al., Proc Natl Acad Sci USA. 2007 6; 104:4095-4100; deFougerolles Hum Gene Ther. 2008 19:125-132; all of which are incorporated herein by reference in its entirety).

[0429] In one embodiment such formulations may also be constructed or compositions altered such that they passively or actively are directed to different cell types in vivo, including but not limited to hepatocytes, immune cells, tumor cells, endothelial cells, antigen presenting cells, and leukocytes (Akinc et al. Mol Ther. 2010 18:1357-1364; Song et al., Nat Biotechnol. 2005 23:709-717; Judge et al., J Clin Invest. 2009 119:661-673; Kaufmann et al., Microvasc Res 2010 80:286-293; Santel et al., Gene Ther 2006 13:1222-1234; Santel et al., Gene Ther 2006 13:1360-1370; Gutbier et al., Pulm Pharmacol. Ther. 2010 23:334-344; Basha et al., Mol. Ther. 2011 19:2186-2200; Fenske and Cullis, Expert Opin Drug Deliv. 2008 5:25-44; Peer et al., Science. 2008 319:627-630; Peer and Lieberman, Gene Ther. 2011 18:1127-1133; all of which are incorporated herein by reference in its entirety). One example of passive targeting of formulations to liver cells includes the DLin-DMA, DLin-KC2-DMA and DLin-MC3-DMA-based lipid nanoparticle formulations which have been shown to bind to apolipoprotein E and promote binding and uptake of these formulations into hepatocytes in vivo (Akinc et al. Mol Ther. 2010 18:1357-1364; herein incorporated by reference in its entirety). Formulations can also be selectively targeted through expression of different ligands on their surface as exemplified by, but not limited by, folate, transferrin, N-acetylgalactosamine (GalNAc), and antibody targeted approaches (Kolhatkar et al., Curr Drug Discov Technol. 2011 8:197-206; Musacchio and Torchilin, Front Biosci. 2011 16:1388-1412; Yu et al., Mol Membr Biol. 2010 27:286-298; Patil et al., Crit Rev Ther Drug Carrier Syst. 2008 25:1-61; Benoit et al., Biomacromolecules. 2011 12:2708-2714; Zhao et al., Expert Opin Drug Deliv. 2008 5:309-319; Akinc et al., Mol Ther. 2010 18:1357-1364; Srinivasan et al., Methods Mol Biol. 2012 820:105-116; Ben-Arie et al., Methods Mol Biol. 2012 757:497-507; Peer 2010 J Control Release. 20:63-68; Peer et al., Proc Natl Acad Sci USA. 2007 104:4095-4100; Kim et al., Methods Mol Biol. 2011 721:339-353; Subramanya et al., Mol Ther. 2010 18:2028-2037; Song et al., Nat Biotechnol. 2005 23:709-717; Peer et al., Science. 2008 319:627-630; Peer and Lieberman, Gene Ther. 2011 18:1127-1133; all of which are incorporated herein by reference in its entirety).

[0430] In one embodiment, the modified nucleic acid molecules or mmRNA are formulated as a solid lipid nanoparticle. A solid lipid nanoparticle (SLN) may be spherical with an average diameter between 10 to 1000 nm. SLN possess a solid lipid core matrix that can solubilize lipophilic molecules and may be stabilized with surfactants and/or emulsifiers. In a further embodiment, the lipid nanoparticle may be a self-assembly lipid-polymer nanoparticle (see Zhang et al., ACS Nano, 2008, 2 (8), pp 1696-1702; herein incorporated by reference in its entirety).

[0431] Liposomes, lipoplexes, or lipid nanoparticles may be used to improve the efficacy of modified nucleic acid molecules or mmRNA directed protein production as these formulations may be able to increase cell transfection by the modified nucleic acid molecule or mmRNA; and/or increase the translation of encoded protein. One such example involves the use of lipid encapsulation to enable the effective systemic delivery of polyplex plasmid DNA (Heyes et al., Mol Ther. 2007 15:713-720; herein incorporated by reference in its entirety). The liposomes, lipoplexes, or lipid nanoparticles may also be used to increase the stability of the modified nucleic acid molecules or mmRNA.

[0432] In one embodiment, the modified nucleic acid molecules and/or the mmRNA of the present invention can be formulated for controlled release and/or targeted delivery. As used herein, “controlled release” refers to a pharmaceutical composition or compound release profile that conforms to a particular pattern of release to effect a therapeutic outcome. In one embodiment, the modified nucleic acids molecules or the mmRNA may be encapsulated into a delivery agent described herein and/or known in the art for controlled release and/or targeted delivery. As used herein, the term “encapsulate” means to enclose, surround or encase. As it relates to the formulation of the compounds of the invention, encapsulation may be substantial, complete or partial. The term “substantially encapsulated” means that at least greater than 50, 60, 70, 80, 85, 90, 95, 96, 97, 98, 99, 99.9, 99.9 or greater than 99.999% of the pharmaceutical composition or compound of the invention may be enclosed, surrounded or encased within the delivery agent. “Partially encapsulation” means that less than 10, 10, 20, 30, 40 50 or less of the pharmaceutical composition or compound of the invention may be enclosed, surrounded or encased within the delivery agent. Advantageously, encapsulation may be determined by measuring the escape or the activity of the pharmaceutical composition or compound of the invention using fluorescence and/or electron micrograph. For example, at least 1, 5, 10, 20, 30, 40, 50, 60, 70, 80, 85, 90, 95, 96, 97, 98, 99, 99.9, 99.99 or greater than 99.99% of the pharmaceutical composition or compound of the invention are encapsulated in the delivery agent.

[0433] In one embodiment, the controlled release formulation may include, but is not limited to, tri-block co-polymers. As a non-limiting example, the formulation may include two different types of tri-block co-polymers (International Pub. No. WO2012131104 and WO2012131106; each of which is herein incorporated by reference in its entirety).

[0434] In another embodiment, the modified nucleic acid molecules or the mmRNA may be encapsulated into a lipid nanoparticle or a rapidly eliminated lipid nanoparticle and the lipid nanoparticles or a rapidly eliminated lipid nanoparticle may then be encapsulated into a polymer, hydrogel and/or surgical sealant described herein and/or known in the art. As a non-limiting example, the polymer, hydrogel or surgical sealant may be PLGA, ethylene vinyl acetate (EVAc), poloxamer, GELSITE® (Nanotherapeutics, Inc. Alachua, Fla.), HYLENEX® (Halozyme Therapeutics, San Diego Calif.), surgical sealants such as fibrinogen polymers (Ethicon Inc. Cornelia, Ga.), TISSELL® (Baxter International, Inc Deerfield, Ill.), PEG-based sealants, and COSEAL® (Baxter International, Inc Deerfield, Ill.).

[0435] In another embodiment, the lipid nanoparticle may be encapsulated into any polymer known in the art which may form a gel when injected into a subject. As a non-limiting example, the lipid nanoparticle may be encapsulated into a polymer matrix which may be biodegradable.

[0436] In one embodiment, the modified nucleic acid molecules or mmRNA formulation for controlled release and/or targeted delivery may also include at least one controlled release coating. Controlled release coatings include, but are not limited to, OPADRY®, polyvinylpyrrolidone/vinyl acetate copolymer, polyvinylpyrrolidone, hydroxypropyl methylcellulose, hydroxypropyl cellulose, hydroxyethyl cellulose, EUDRAGIT RL®, EUDRAGIT RS® and cellulose derivatives such as ethylcellulose aqueous dispersions (AQUACOAT® and SURELEASE®).

[0437] In one embodiment, the controlled release and/or targeted delivery formulation may comprise at least one degradable polyester which may contain polycationic side chains. Degradeable polyesters include, but are not limited to, poly(serine ester), poly(L-lactide-co-L-lysine), poly(4-hydroxy-L-proline ester), and combinations thereof. In another embodiment, the degradable polyesters may include a PEG conjugation to form a PEGylated polymer.

[0438] In one embodiment, the modified nucleic acid molecules and/or the mmRNA of the present invention may be encapsulated in a therapeutic nanoparticle. Therapeutic nanoparticles may be formulated by methods described herein and known in the art such as, but not limited to, International Pub Nos. WO2010005740, WO2010030763, WO2010005721, WO2010005723, WO2012054923, US Pub. Nos. US20110262491, US20100104645, US20100087337, US20100068285, US20110274759, US20100068286 and US20120288541, and U.S. Pat. Nos. 8,206,747, 8,293,276 8,318,208 and 8,318,211; each of which is herein incorporated by reference in their entirety. In another embodiment, therapeutic polymer nanoparticles may be identified by the methods described in US Pub No. US20120140790, herein incorporated by reference in its entirety.

[0439] In one embodiment, the therapeutic nanoparticle may be formulated for sustained release. As used herein, “sustained release” refers to a pharmaceutical composition or compound that conforms to a release rate over a specific period of time. The period of time may include, but is not limited to, hours, days, weeks, months and years. As a non-limiting example, the sustained release nanoparticle may comprise a polymer and a therapeutic agent such as, but not limited to, the modified nucleic acid molecules and mmRNA of the present invention (see International Pub No. 2010075072 and US Pub No. US20100216804, US20110217377 and US20120201859, each of which is herein incorporated by reference in their entirety).

[0440] In one embodiment, the therapeutic nanoparticles may be formulated to be target specific. As a non-limiting example, the therapeutic nanoparticles may include a corticosteroid (see International Pub. No. WO2011084518 herein incorporated by reference in its entirety). In one embodiment, the therapeutic nanoparticles of the present invention may be formulated to be cancer specific. As a non-limiting example, the therapeutic nanoparticles may be formulated in nanoparticles described in International Pub No. WO2008121949, WO2010005726, WO2010005725, WO2011084521 and US Pub No. US20100069426, US20120004293 and US20100104655, each of which is herein incorporated by reference in their entirety.

[0441] In one embodiment, the nanoparticles of the present invention may comprise a polymeric matrix. As a non-limiting example, the nanoparticle may comprise two or more polymers such as, but not limited to, polyethylenes, polycarbonates, polyanhydrides, polyhydroxyacids, polypropylfumerates, polycaprolactones, polyamides, polyacetals, polyethers, polyesters, poly(orthoesters), polycyanoacrylates, polyvinyl alcohols, polyurethanes, polyphosphazenes, polyacrylates, polymethacrylates, polycyanoacrylates, polyureas, polystyrenes, polyamines, polylysine, poly(ethylene imine), poly(serine ester), poly(L-lactide-co-L-lysine), poly(4-hydroxy-L-proline ester) or combinations thereof.

[0442] In one embodiment, the therapeutic nanoparticle comprises a diblock copolymer. In one embodiment, the diblock copolymer may include PEG in combination with a polymer such as, but not limited to, polyethylenes, polycarbonates, polyanhydrides, polyhydroxyacids, polypropylfumerates, polycaprolactones, polyamides, polyacetals, polyethers, polyesters, poly(orthoesters), polycyanoacrylates, polyvinyl alcohols, polyurethanes, polyphosphazenes, polyacrylates, polymethacrylates, polycyanoacrylates, polyureas, polystyrenes, polyamines, polylysine, poly(ethylene imine), poly(serine ester), poly(L-lactide-co-L-lysine), poly(4-hydroxy-L-proline ester) or combinations thereof.

[0443] As a non-limiting example the therapeutic nanoparticle comprises a PLGA-PEG block copolymer (see US Pub. No. US20120004293 and U.S. Pat. No. 8,236,330, each of which is herein incorporated by reference in their entirety). In another non-limiting example, the therapeutic nanoparticle is a stealth nanoparticle comprising a diblock copolymer of PEG and PLA or PEG and PLGA (see U.S. Pat. No. 8,246,968, herein incorporated by reference in its entirety).

[0444] In one embodiment, the therapeutic nanoparticle may comprise a multiblock copolymer (See e.g., U.S. Pat. Nos. 8,263,665 and 8,287,910; each of which is herein incorporated by reference in its entirety).

[0445] In one embodiment, the block copolymers described herein may be included in a polyion complex comprising a non-polymeric micelle and the block copolymer. (See e.g., U.S. Pub. No. 20120076836; herein incorporated by reference in its entirety).

[0446] In one embodiment, the therapeutic nanoparticle may comprise at least one acrylic polymer. Acrylic polymers include but are not limited to, acrylic acid, methacrylic acid, acrylic acid and methacrylic acid copolymers, methyl methacrylate copolymers, ethoxyethyl methacrylates, cyanoethyl methacrylate, amino alkyl methacrylate copolymer, poly(acrylic acid), poly(methacrylic acid), polycyanoacrylates and combinations thereof.

[0447] In one embodiment, the therapeutic nanoparticles may comprise at least one cationic polymer described herein and/or known in the art.

[0448] In one embodiment, the therapeutic nanoparticles may comprise at least one amine-containing polymer such as, but not limited to polylysine, polyethylene imine, poly(amidoamine) dendrimers, poly(beta-amino esters) (See e.g., U.S. Pat. No. 8,287,849; herein incorporated by reference in its entirety) and combinations thereof

[0449] In one embodiment, the therapeutic nanoparticles may comprise at least one degradable polyester which may contain polycationic side chains. Degradeable polyesters include, but are not limited to, poly(serine ester), poly(L-lactide-co-L-lysine), poly(4-hydroxy-L-proline ester), and combinations thereof. In another embodiment, the degradable polyesters may include a PEG conjugation to form a PEGylated polymer.

[0450] In another embodiment, the therapeutic nanoparticle may include a conjugation of at least one targeting ligand. The targeting ligand may be any ligand known in the art such as, but not limited to, a monoclonal antibody. (Kirpotin et al, Cancer Res. 2006 66:6732-6740; herein incorporated by reference in its entirety).

[0451] In one embodiment, the therapeutic nanoparticle may be formulated in an aqueous solution which may be used to target cancer (see International Pub No. WO2011084513 and US Pub No. US20110294717, each of which is herein incorporated by reference in their entirety).

[0452] In one embodiment, the modified nucleic acid molecules or mmRNA may be encapsulated in, linked to and/or associated with synthetic nanocarriers. Synthetic nanocarriers include, but are not limited to, those described in International Pub. Nos. WO2010005740, WO2010030763, WO201213501, WO2012149252, WO2012149255, WO2012149259, WO2012149265, WO2012149268, WO2012149282, WO2012149301, WO2012149393, WO2012149405, WO2012149411 and WO2012149454 and US Pub. Nos. US20110262491, US20100104645, US20100087337 and US20120244222, each of which is herein incorporated by reference in their entirety. The synthetic nanocarriers may be formulated using methods known in the art and/or described herein. As a non-limiting example, the synthetic nanocarriers may be formulated by the methods described in International Pub Nos. WO2010005740, WO2010030763 and WO201213501 and US Pub. Nos. US20110262491, US20100104645, US20100087337 and US20120244222, each of which is herein incorporated by reference in their entirety. In another embodiment, the synthetic nanocarrier formulations may be lyophilized by methods described in International Pub. No. WO2011072218 and U.S. Pat. No. 8,211,473; each of which is herein incorporated by reference in their entirety.

[0453] In one embodiment, the synthetic nanocarriers may contain reactive groups to release the modified nucleic acid molecules and/or mmRNA described herein (see International Pub. No. WO20120952552 and US Pub No. US20120171229, each of which is herein incorporated by reference in their entirety).

[0454] In one embodiment, the synthetic nanocarriers may contain an immunostimulatory agent to enhance the immune response from delivery of the synthetic nanocarrier. As a non-limiting example, the synthetic nanocarrier may comprise a Th1 immunostimulatory agent which may enhance a Th1-based response of the immune system (see International Pub No. WO2010123569 and US Pub. No. US20110223201, each of which is herein incorporated by reference in its entirety).

[0455] In one embodiment, the synthetic nanocarriers may be formulated for targeted release. In one embodiment, the synthetic nanocarrier is formulated to release the modified nucleic acid molecules and/or mmRNA at a specified pH and/or after a desired time interval. As a non-limiting example, the synthetic nanoparticle may be formulated to release the modified mRNA molecules and/or mmRNA after 24 hours and/or at a pH of 4.5 (see International Pub. Nos. WO2010138193 and WO2010138194 and US Pub Nos. US20110020388 and US20110027217, each of which is herein incorporated by reference in their entirety).

[0456] In one embodiment, the synthetic nanocarriers may be formulated for controlled and/or sustained release of the modified nucleic acid molecules and/or mmRNA described herein. As a non-limiting example, the synthetic nanocarriers for sustained release may be formulated by methods known in the art, described herein and/or as described in International Pub No. WO2010138192 and US Pub No. 20100303850, each of which is herein incorporated by reference in their entirety.

[0457] In one embodiment, the synthetic nanocarrier may be formulated for use as a vaccine. In one embodiment, the synthetic nanocarrier may encapsulate at least one modified nucleic acid molecule and/or mmRNA which encodes at least one antigen. As a non-limiting example, the synthetic nanocarrier may include at least one antigen and an excipient for a vaccine dosage form (see International Pub No. WO2011150264 and US Pub No. US20110293723, each of which is herein incorporated by reference in their entirety). As another non-limiting example, a vaccine dosage form may include at least two synthetic nanocarriers with the same or different antigens and an excipient (see International Pub No. WO2011150249 and US Pub No. US20110293701, each of which is herein incorporated by reference in their entirety). The vaccine dosage form may be selected by methods described herein, known in the art and/or described in International Pub No. WO2011150258 and US Pub No. US20120027806, each of which is herein incorporated by reference in their entirety).

[0458] In one embodiment, the synthetic nanocarrier may comprise at least one modified nucleic acid molecule and/or mmRNA which encodes at least one adjuvant. In another embodiment, the synthetic nanocarrier may comprise at least one modified nucleic molecule acid and/or mmRNA and an adjuvant. As a non-limiting example, the synthetic nanocarrier comprising and adjuvant may be formulated by the methods described in International Pub No. WO2011150240 and US Pub No. US20110293700, each of which is herein incorporated by reference in its entirety.

[0459] In one embodiment, the synthetic nanocarrier may encapsulate at least one modified nucleic acid molecule and/or mmRNA which encodes a peptide, fragment or region from a virus. As a non-limiting example, the synthetic nanocarrier may include, but is not limited to, the nanocarriers described in International Pub No. WO2012024621, WO201202629, WO2012024632 and US Pub No. US20120064110, US20120058153 and US20120058154, each of which is herein incorporated by reference in their entirety.

[0460] In one embodiment, the nanoparticle may be optimized for oral administration. The nanoparticle may comprise at least one cationic biopolymer such as, but not limited to, chitosan or a derivative thereof. As a non-limiting example, the nanoparticle may be formulated by the methods described in U.S. Pub. No. 20120282343; herein incorporated by reference in its entirety.

### Polymers, Biodegradable Nanoparticles, and Core-Shell Nanoparticles

[0461] The modified nucleic acid molecules and mmRNA of the invention can be formulated using natural and/or synthetic polymers. Non-limiting examples of polymers which may be used for delivery include, but are not limited to, DYNAMIC POLYCONJUGATE® (Arrowhead Research Corp., Pasadena, Calif.) formulations from MIRUS® Bio (Madison, Wis.) and Roche Madison (Madison, Wis.), PHASERX™ polymer formulations such as, without limitation, SMARTT POLYMER TECHNOLOGY™ (Seattle, Wash.), DMRI/DOPE, poloxamer, VAXFECTIN® adjuvant from Vical (San Diego, Calif.), chitosan, cyclodextrin from Calando Pharmaceuticals (Pasadena, Calif.), dendrimers and poly(lactic-co-glycolic acid) (PLGA) polymers, RONDEL™ (RNAi/Oligonucleotide Nanoparticle Delivery) polymers (Arrowhead Research Corporation, Pasadena, Calif.) and pH responsive co-block polymers such as, but not limited to, PHASERX™ (Seattle, Wash.).

[0462] A non-limiting example of chitosan formulation includes a core of positively charged chitosan and an outer portion of negatively charged substrate (U.S. Pub. No. 20120258176; herein incorporated by reference in its entirety). Chitosan includes, but is not limited to N-trimethyl chitosan, mono-N-carboxymethyl chitosan (MCC), N-palmitoyl chitosan (NPCS), EDTA-chitosan, low molecular weight chitosan, chitosan derivatives, or combinations thereof.

[0463] In one embodiment, the polymers used in the present invention have undergone processing to reduce and/or inhibit the attachment of unwanted substances such as, but not limited to, bacteria, to the surface of the polymer. The polymer may be processed by methods known and/or described in the art and/or described in International Pub. No. WO2012150467, herein incorporated by reference in its entirety.

[0464] A non-limiting example of PLGA formulations include, but are not limited to, PLGA injectable depots (e.g., ELIGARD® which is formed by dissolving PLGA in 66% N-methyl-2-pyrrolidone (NMP) and the remainder being aqueous solvent and leuprolide. Once injected, the PLGA and leuprolide peptide precipitates into the subcutaneous space).

[0465] Many of these polymer approaches have demonstrated efficacy in delivering oligonucleotides in vivo into the cell cytoplasm (reviewed in deFougerolles Hum Gene Ther. 2008 19:125-132; herein incorporated by reference in its entirety). Two polymer approaches that have yielded robust in vivo delivery of nucleic acids, in this case with small interfering RNA (siRNA), are dynamic polyconjugates and cyclodextrin-based nanoparticles. The first of these delivery approaches uses dynamic polyconjugates and has been shown in vivo in mice to effectively deliver siRNA and silence endogenous target mRNA in hepatocytes (Rozema et al., Proc Natl Acad Sci USA. 2007 104:12982-12887; herein incorporated by reference in its entirety). This particular approach is a multicomponent polymer system whose key features include a membrane-active polymer to which nucleic acid, in this case siRNA, is covalently coupled via a disulfide bond and where both PEG (for charge masking) and N-acetylgalactosamine (for hepatocyte targeting) groups are linked via pH-sensitive bonds (Rozema et al., Proc Natl Acad Sci USA. 2007 104:12982-12887; herein incorporated by reference in its entirety). On binding to the hepatocyte and entry into the endosome, the polymer complex disassembles in the low-pH environment, with the polymer exposing its positive charge, leading to endosomal escape and cytoplasmic release of the siRNA from the polymer. Through replacement of the N-acetylgalactosamine group with a mannose group, it was shown one could alter targeting from asialoglycoprotein receptor-expressing hepatocytes to sinusoidal endothelium and Kupffer cells. Another polymer approach involves using transferrin-targeted cyclodextrin-containing polycation nanoparticles. These nanoparticles have demonstrated targeted silencing of the EWS-FLIT gene product in transferrin receptor-expressing Ewing's sarcoma tumor cells (Hu-Lieskovan et al., Cancer Res. 2005 65: 8984-8982; herein incorporated by reference in its entirety) and siRNA formulated in these nanoparticles was well tolerated in non-human primates (Heidel et al., Proc Natl Acad Sci USA 2007 104:5715-21; herein incorporated by reference in its entirety). Both of these delivery strategies incorporate rational approaches using both targeted delivery and endosomal escape mechanisms.

[0466] The polymer formulation can permit the sustained or delayed release of modified nucleic acid molecules or mmRNA (e.g., following intramuscular or subcutaneous injection). The altered release profile for the modified nucleic acid molecule or mmRNA can result in, for example, translation of an encoded protein over an extended period of time. The polymer formulation may also be used to increase the stability of the modified nucleic acid molecule or mmRNA. Biodegradable polymers have been previously used to protect nucleic acids other than mmRNA from degradation and been shown to result in sustained release of payloads in vivo (Rozema et al., Proc Natl Acad Sci USA. 2007 104:12982-12887; Sullivan et al., Expert Opin Drug Deliv. 2010 7:1433-1446; Convertine et al., Biomacromolecules. 2010 Oct. 1; Chu et al., Acc Chem Res. 2012 Jan. 13; Manganiello et al., Biomaterials. 2012 33:2301-2309; Benoit et al., Biomacromolecules. 2011 12:2708-2714; Singha et al., Nucleic Acid Ther. 2011 2:133-147; deFougerolles Hum Gene Ther. 2008 19:125-132; Schaffert and Wagner, Gene Ther. 2008 16:1131-1138; Chaturvedi et al., Expert Opin Drug Deliv. 2011 8:1455-1468; Davis, Mol Pharm. 2009 6:659-668; Davis, Nature 2010 464:1067-1070; each of which is herein incorporated by reference in its entirety).

[0467] In one embodiment, the pharmaceutical compositions may be sustained release formulations. In a further embodiment, the sustained release formulations may be for subcutaneous delivery. Sustained release formulations may include, but are not limited to, PLGA microspheres, ethylene vinyl acetate (EVAc), poloxamer, GELSITE® (Nanotherapeutics, Inc. Alachua, Fla.), HYLENEX® (Halozyme Therapeutics, San Diego Calif.), surgical sealants such as fibrinogen polymers (Ethicon Inc. Cornelia, Ga.), TISSELL® (Baxter International, Inc Deerfield, Ill.), PEG-based sealants, and COSEAL® (Baxter International, Inc Deerfield, Ill.).

[0468] As a non-limiting example modified mRNA may be formulated in PLGA microspheres by preparing the PLGA microspheres with tunable release rates (e.g., days and weeks) and encapsulating the modified mRNA in the PLGA microspheres while maintaining the integrity of the modified mRNA during the encapsulation process. EVAc are non-biodegradable, biocompatible polymers which are used extensively in pre-clinical sustained release implant applications (e.g., extended release products Ocusert a pilocarpine ophthalmic insert for glaucoma or progestasert a sustained release progesterone intrauterine device; transdermal delivery systems Testoderm, Duragesic and Selegiline; catheters). Poloxamer F-407 NF is a hydrophilic, non-ionic surfactant triblock copolymer of polyoxyethylene-polyoxypropylene-polyoxyethylene having a low viscosity at temperatures less than 5° C. and forms a solid gel at temperatures greater than 15° C. PEG-based surgical sealants comprise two synthetic PEG components mixed in a delivery device which can be prepared in one minute, seals in 3 minutes and is reabsorbed within 30 days. GELSITE® and natural polymers are capable of in-situ gelation at the site of administration. They have been shown to interact with protein and peptide therapeutic candidates through ionic interaction to provide a stabilizing effect.

[0469] Polymer formulations can also be selectively targeted through expression of different ligands as exemplified by, but not limited by, folate, transferrin, and N-acetylgalactosamine (GalNAc) (Benoit et al., Biomacromolecules. 2011 12:2708-2714; Rozema et al., Proc Natl Acad Sci USA. 2007 104:12982-12887; Davis, Mol Pharm. 2009 6:659-668; Davis, Nature 2010 464:1067-1070; each of which is herein incorporated by reference in its entirety).

[0470] The modified nucleic acid molecules and mmRNA of the invention may be formulated with or in a polymeric compound. The polymer may include at least one polymer such as, but not limited to, polyethenes, polyethylene glycol (PEG), poly(l-lysine)(PLL), PEG grafted to PLL, cationic lipopolymer, biodegradable cationic lipopolymer, polyethyleneimine (PEI), cross-linked branched poly(alkylene imines), a polyamine derivative, a modified poloxamer, a biodegradable polymer, elastic biodegradable polymer, biodegradable block copolymer, biodegradable random copolymer, biodegradable polyester copolymer, biodegradable polyester block copolymer, biodegradable polyester block random copolymer, multiblock copolymers, linear biodegradable copolymer, poly[α-(4-aminobutyl)-L-glycolic acid) (PAGA), biodegradable cross-linked cationic multi-block copolymers, polycarbonates, polyanhydrides, polyhydroxyacids, polypropylfumerates, polycaprolactones, polyamides, polyacetals, polyethers, polyesters, poly(orthoesters), polycyanoacrylates, polyvinyl alcohols, polyurethanes, polyphosphazenes, polyacrylates, polymethacrylates, polycyanoacrylates, polyureas, polystyrenes, polyamines, polylysine, poly(ethylene imine), poly(serine ester), poly(L-lactide-co-L-lysine), poly(4-hydroxy-L-proline ester), acrylic polymers, amine-containing polymers, dextran polymers, dextran polymer derivatives or combinations thereof.

[0471] As a non-limiting example, the modified nucleic acid molecules or mmRNA of the invention may be formulated with the polymeric compound of PEG grafted with PLL as described in U.S. Pat. No. 6,177,274; herein incorporated by reference in its entirety. The formulation may be used for transfecting cells in vitro or for in vivo delivery of the modified nucleic acid molecules and mmRNA. In another example, the modified nucleic acid molecules and mmRNA may be suspended in a solution or medium with a cationic polymer, in a dry pharmaceutical composition or in a solution that is capable of being dried as described in U.S. Pub. Nos. 20090042829 and 20090042825; each of which are herein incorporated by reference in their entireties.

[0472] As another non-limiting example the modified nucleic acid molecules or mmRNA of the invention may be formulated with a PLGA-PEG block copolymer (see US Pub. No. US20120004293 and U.S. Pat. No. 8,236,330, each of which are herein incorporated by reference in their entireties) or PLGA-PEG-PLGA block copolymers (See U.S. Pat. No. 6,004,573, herein incorporated by reference in its entirety). As a non-limiting example, the modified nucleic acid molecules or mmRNA of the invention may be formulated with a diblock copolymer of PEG and PLA or PEG and PLGA (see U.S. Pat. No. 8,246,968, herein incorporated by reference in its entirety).

[0473] A polyamine derivative may be used to deliver nucleic acid molecules and/or mmRNA or to treat and/or prevent a disease or to be included in an implantable or injectable device (U.S. Pub. No. 20100260817 herein incorporated by reference in its entirety). As a non-limiting example, a pharmaceutical composition may include the modified nucleic acid molecules and mmRNA and the polyamine derivative described in U.S. Pub. No. 20100260817 (the contents of which are incorporated herein by reference in its entirety). As a non-limiting example the modified nucleic acids or mmRNA of the present invention may be delivered using a polyaminde polymer such as, but not limited to, a polymer comprising a 1,3-dipolar addition polymer prepared by combining a carbohydrate diazide monomer with a dilkyne unite comprising oligoamines (U.S. Pat. No. 8,236,280; herein incorporated by reference in its entirety).

[0474] The modified nucleic acid molecules and/or mmRNA of the invention may be formulated with at least one acrylic polymer. Acrylic polymers include but are not limited to, acrylic acid, methacrylic acid, acrylic acid and methacrylic acid copolymers, methyl methacrylate copolymers, ethoxyethyl methacrylates, cyanoethyl methacrylate, amino alkyl methacrylate copolymer, poly(acrylic acid), poly(methacrylic acid), polycyanoacrylates and combinations thereof

[0475] In one embodiment, the modified nucleic acid molecules and/or mmRNA of the present invention may be formulated with at least one polymer and/or derivatives thereof described in International Publication Nos. WO2011115862, WO2012082574 and WO2012068187 and U.S. Pub. No. 20120283427, each of which are herein incorporated by reference in their entireties. In another embodiment, the modified nucleic acid molecules or mmRNA of the present invention may be formulated with a polymer of formula Z as described in WO2011115862, herein incorporated by reference in its entirety. In yet another embodiment, the modified nucleic acid molecules or mmRNA may be formulated with a polymer of formula Z, Z′ or Z″ as described in International Pub. Nos. WO2012082574 or WO2012068187, each of which are herein incorporated by reference in their entireties. The polymers formulated with the modified nucleic acids and/or modified mRNA of the present invention may be synthesized by the methods described in International Pub. Nos. WO2012082574 or WO2012068187, each of which are herein incorporated by reference in their entireties.

[0476] Formulations of modified nucleic acid molecules and/or mmRNA of the invention may include at least one amine-containing polymer such as, but not limited to polylysine, polyethylene imine, poly(amidoamine) dendrimers or combinations thereof

[0477] For example, the modified nucleic acid molecules and/or mmRNA of the invention may be formulated in a pharmaceutical compound including a poly(alkylene imine), a biodegradable cationic lipopolymer, a biodegradable block copolymer, a biodegradable polymer, or a biodegradable random copolymer, a biodegradable polyester block copolymer, a biodegradable polyester polymer, a biodegradable polyester random copolymer, a linear biodegradable copolymer, PAGA, a biodegradable cross-linked cationic multi-block copolymer or combinations thereof. The biodegradable cationic lipopolymer may be made by methods known in the art and/or described in U.S. Pat. No. 6,696,038, U.S. App. Nos. 20030073619 and 20040142474 each of which is herein incorporated by reference in their entireties. The poly(alkylene imine) may be made using methods known in the art and/or as described in U.S. Pub. No. 20100004315, herein incorporated by reference in its entirety. The biodegradable polymer, biodegradable block copolymer, the biodegradable random copolymer, biodegradable polyester block copolymer, biodegradable polyester polymer, or biodegradable polyester random copolymer may be made using methods known in the art and/or as described in U.S. Pat. Nos. 6,517,869 and 6,267,987, the contents of which are each incorporated herein by reference in their entirety. The linear biodegradable copolymer may be made using methods known in the art and/or as described in U.S. Pat. No. 6,652,886. The PAGA polymer may be made using methods known in the art and/or as described in U.S. Pat. No. 6,217,912 herein incorporated by reference in its entirety. The PAGA polymer may be copolymerized to form a copolymer or block copolymer with polymers such as but not limited to, poly-L-lysine, polyargine, polyornithine, histones, avidin, protamines, polylactides and poly(lactide-co-glycolides). The biodegradable cross-linked cationic multi-block copolymers may be made my methods known in the art and/or as described in U.S. Pat. No. 8,057,821 or U.S. Pub. No. 2012009145 each of which are herein incorporated by reference in their entireties. For example, the multi-block copolymers may be synthesized using linear polyethyleneimine (LPEI) blocks which have distinct patterns as compared to branched polyethyleneimines. Further, the composition or pharmaceutical composition may be made by the methods known in the art, described herein, or as described in U.S. Pub. No. 20100004315 or U.S. Pat. Nos. 6,267,987 and 6,217,912 each of which are herein incorporated by reference in their entireties.

[0478] The modified nucleic acid molecules and mmRNA of the invention may be formulated with at least one degradable polyester which may contain polycationic side chains. Degradeable polyesters include, but are not limited to, poly(serine ester), poly(L-lactide-co-L-lysine), poly(4-hydroxy-L-proline ester), and combinations thereof. In another embodiment, the degradable polyesters may include a PEG conjugation to form a PEGylated polymer.

[0479] The modified nucleic acid molecules and mmRNA of the invention may be formulated with at least one crosslinkable polyester. Crosslinkable polyesters include those known in the art and described in US Pub. No. 20120269761, herein incorporated by reference in its entirety.

[0480] In one embodiment, the polymers described herein may be conjugated to a lipid-terminating PEG. As a non-limiting example, PLGA may be conjugated to a lipid-terminating PEG forming PLGA-DSPE-PEG. As another non-limiting example, PEG conjugates for use with the present invention are described in International Publication No. WO2008103276, herein incorporated by reference in its entirety. The polymers may be conjugated using a ligand conjugate such as, but not limited to, the conjugates described in U.S. Pat. No. 8,273,363, herein incorporated by reference in its entirety.

[0481] In one embodiment, the modified nucleic acid molecules and/or mmRNA described herein may be conjugated with another compound. Non-limiting examples of conjugates are described in U.S. Pat. Nos. 7,964,578 and 7,833,992, each of which are herein incorporated by reference in their entireties. In another embodiment, modified RNA of the present invention may be conjugated with conjugates of formula 1-122 as described in U.S. Pat. Nos. 7,964,578 and 7,833,992, each of which are herein incorporated by reference in their entireties. The modified RNA described herein may be conjugated with a metal such as, but not limited to, gold. (See e.g., Giljohann et al. Journ. Amer. Chem. Soc. 2009 131(6): 2072-2073; herein incorporated by reference in its entirety). In another embodiment, the modified nucleic acid molecules and/or mmRNA described herein may be conjugated and/or encapsulated in gold-nanoparticles. (Interantional Pub. No. WO201216269 and U.S. Pub. No. 20120302940; each of which is herein incorporated by reference in its entirety).

[0482] As described in U.S. Pub. No. 20100004313, herein incorporated by reference in its entirety, a gene delivery composition may include a nucleotide sequence and a poloxamer. For example, the modified nucleic acid and mmRNA of the present invention may be used in a gene delivery composition with the poloxamer described in U.S. Pub. No. 20100004313.

[0483] In one embodiment, the polymer formulation of the present invention may be stabilized by contacting the polymer formulation, which may include a cationic carrier, with a cationic lipopolymer which may be covalently linked to cholesterol and polyethylene glycol groups. The polymer formulation may be contacted with a cationic lipopolymer using the methods described in U.S. Pub. No. 20090042829 herein incorporated by reference in its entirety. The cationic carrier may include, but is not limited to, polyethylenimine, poly(trimethylenimine), poly(tetramethylenimine), polypropylenimine, aminoglycoside-polyamine, dideoxy-diamino-b-cyclodextrin, spermine, spermidine, poly(2-dimethylamino)ethyl methacrylate, poly(lysine), poly(histidine), poly(arginine), cationized gelatin, dendrimers, chitosan, 1,2-Dioleoyl-3-Trimethylammonium-Propane (DOTAP), N-[1-(2,3-dioleoyloxy)propyl]-N, N,N-trimethylammonium chloride (DOTMA), 1-[2-(oleoyloxy)ethyl]-2-oleyl-3-(2-hydroxyethyl)imidazolinium chloride (DOTIM), 2,3-dioleyloxy-N-[2(sperminecarboxamido)ethyl]-N,N-dimethyl-1-propanaminium trifluoroacetate (DOSPA), 3B—[N—(N′,N′-Dimethylaminoethane)-carbamoyl] Cholesterol Hydrochloride (DC-Cholesterol HCl) diheptadecylamidoglycyl spermidine (DOGS), N,N-distearyl-N,N-dimethylammonium bromide (DDAB), N-(1,2-dimyristyloxyprop-3-yl)-N,N-dimethyl-N-hydroxyethyl ammonium bromide (DMRIE), N,N-dioleyl-N,N-dimethylammonium chloride DODAC) and combinations thereof

[0484] The modified nucleic acid molecules and/or mmRNA of the invention may be formulated in a polyplex of one or more polymers (U.S. Pub. No. 20120237565 and 20120270927; each of which is herein incorporated by reference in its entirety). In one embodiment, the polyplex comprises two or more cationic polymers. The cationic polymer may comprise a poly(ethylene imine) (PEI) such as linear PEI.

[0485] The modified nucleic acid molecules and mmRNA of the invention can also be formulated as a nanoparticle using a combination of polymers, lipids, and/or other biodegradable agents, such as, but not limited to, calcium phosphate. Components may be combined in a core-shell, hybrid, and/or layer-by-layer architecture, to allow for fine-tuning of the nanoparticle so to delivery of the modified nucleic acid molecule and mmRNA may be enhanced (Wang et al., Nat Mater. 2006 5:791-796; Fuller et al., Biomaterials. 2008 29:1526-1532; DeKoker et al., Adv Drug Deliv Rev. 2011 63:748-761; Endres et al., Biomaterials. 2011 32:7721-7731; Su et al., Mol Pharm. 2011 Jun. 6; 8(3):774-87; each of which is herein incorporated by reference in its entirety). As a non-limiting example, the nanoparticle may comprise a plurality of polymers such as, but not limited to hydrophilic-hydrophobic polymers (e.g., PEG-PLGA), hydrophobic polymers (e.g., PEG) and/or hydrophilic polymers (International Pub. No. WO20120225129; herein incorporated by reference in its entirety).

[0486] Biodegradable calcium phosphate nanoparticles in combination with lipids and/or polymers have been shown to deliver modified nucleic acid molecules and mmRNA in vivo. In one embodiment, a lipid coated calcium phosphate nanoparticle, which may also contain a targeting ligand such as anisamide, may be used to deliver the modified nucleic acid molecule and mmRNA of the present invention. For example, to effectively deliver siRNA in a mouse metastatic lung model a lipid coated calcium phosphate nanoparticle was used (Li et al., J Contr Rel. 2010 142: 416-421; Li et al., J Contr Rel. 2012 158:108-114; Yang et al., Mol Ther. 2012 20:609-615; herein incorporated by reference in its entirety). This delivery system combines both a targeted nanoparticle and a component to enhance the endosomal escape, calcium phosphate, in order to improve delivery of the siRNA.

[0487] In one embodiment, calcium phosphate with a PEG-polyanion block copolymer may be used to deliver modified nucleic acid molecules and mmRNA (Kazikawa et al., J Contr Rel. 2004 97:345-356; Kazikawa et al., J Contr Rel. 2006 111:368-370; herein incorporated by reference in its entirety).

[0488] In one embodiment, a PEG-charge-conversional polymer (Pitella et al., Biomaterials. 2011 32:3106-3114) may be used to form a nanoparticle to deliver the modified nucleic acid molecules and mmRNA of the present invention. The PEG-charge-conversional polymer may improve upon the PEG-polyanion block copolymers by being cleaved into a polycation at acidic pH, thus enhancing endosomal escape.

[0489] The use of core-shell nanoparticles has additionally focused on a high-throughput approach to synthesize cationic cross-linked nanogel cores and various shells (Siegwart et al., Proc Natl Acad Sci USA. 2011 108:12996-13001). The complexation, delivery, and internalization of the polymeric nanoparticles can be precisely controlled by altering the chemical composition in both the core and shell components of the nanoparticle. For example, the core-shell nanoparticles may efficiently deliver siRNA to mouse hepatocytes after they covalently attach cholesterol to the nanoparticle.

[0490] In one embodiment, a hollow lipid core comprising a middle PLGA layer and an outer neutral lipid layer containing PEG may be used to delivery of the modified nucleic acid molecules and mmRNA of the present invention. As a non-limiting example, in mice bearing a luciferase-expressing tumor, it was determined that the lipid-polymer-lipid hybrid nanoparticle significantly suppressed luciferase expression, as compared to a conventional lipoplex (Shi et al, Angew Chem Int Ed. 2011 50:7027-7031; herein incorporated by reference in its entirety).

[0491] In one embodiment, the lipid nanoparticles may comprise a core of the modified nucleic acid molecules disclosed herein and a polymer shell. The polymer shell may be any of the polymers described herein and are known in the art. In an additional embodiment, the polymer shell may be used to protect the modified nucleic acids in the core.

[0492] Core-shell nanoparticles for use with the modified nucleic acid molecules of the present invention are described and may be formed by the methods described in U.S. Pat. No. 8,313,777 herein incorporated by reference in its entirety.

[0493] In one embodiment, the core-shell nanoparticles may comprise a core of the modified nucleic acid molecules disclosed herein and a polymer shell. The polymer shell may be any of the polymers described herein and are known in the art. In an additional embodiment, the polymer shell may be used to protect the modified nucleic acid molecules in the core.

### Peptides and Proteins

[0494] The modified nucleic acid molecules and mmRNA of the invention can be formulated with peptides and/or proteins in order to increase transfection of cells by the modified nucleic acid molecules or mmRNA. In one embodiment, peptides such as, but not limited to, cell penetrating peptides and proteins and peptides that enable intracellular delivery may be used to deliver pharmaceutical formulations. A non-limiting example of a cell penetrating peptide which may be used with the pharmaceutical formulations of the present invention include a cell-penetrating peptide sequence attached to polycations that facilitates delivery to the intracellular space, e.g., HIV-derived TAT peptide, penetratins, transportans, or hCT derived cell-penetrating peptides (see, e.g., Caron et al., Mol. Ther. 3(3):310-8 (2001); Langel, Cell-Penetrating Peptides: Processes and Applications (CRC Press, Boca Raton Fla., 2002); El-Andaloussi et al., Curr. Pharm. Des. 11(28):3597-611 (2003); and Deshayes et al., Cell. Mol. Life Sci. 62(16):1839-49 (2005), all of which are incorporated herein by reference). The compositions can also be formulated to include a cell penetrating agent, e.g., liposomes, which enhance delivery of the compositions to the intracellular space. Modified nucleic acid molecules and mmRNA of the invention may be complexed to peptides and/or proteins such as, but not limited to, peptides and/or proteins from Aileron Therapeutics (Cambridge, Mass.) and Permeon Biologics (Cambridge, Mass.) in order to enable intracellular delivery (Cronican et al., ACS Chem. Biol. 2010 5:747-752; McNaughton et al., Proc. Natl. Acad. Sci. USA 2009 106:6111-6116; Sawyer, Chem Biol Drug Des. 2009 73:3-6; Verdine and Hilinski, Methods Enzymol. 2012; 503:3-33; all of which are herein incorporated by reference in its entirety).

[0495] In one embodiment, the cell-penetrating polypeptide may comprise a first domain and a second domain. The first domain may comprise a supercharged polypeptide. The second domain may comprise a protein-binding partner. As used herein, “protein-binding partner” includes, but are not limited to, antibodies and functional fragments thereof, scaffold proteins, or peptides. The cell-penetrating polypeptide may further comprise an intracellular binding partner for the protein-binding partner. The cell-penetrating polypeptide may be capable of being secreted from a cell where the modified nucleic acid molecules or mmRNA may be introduced.

[0496] Formulations of the including peptides or proteins may be used to increase cell transfection by the modified nucleic acid molecule or mmRNA, alter the biodistribution of the modified nucleic acid molecule or mmRNA (e.g., by targeting specific tissues or cell types), and/or increase the translation of encoded protein. (See e.g., International Pub. No. WO2012110636; herein incorporated by reference in its entirety).

### Cells

[0497] The modified nucleic acid molecule and mmRNA of the invention can be transfected ex vivo into cells, which are subsequently transplanted into a subject. As non-limiting examples, the pharmaceutical compositions may include red blood cells to deliver modified RNA to liver and myeloid cells, virosomes to deliver modified nucleic acid molecules and mmRNA in virus-like particles (VLPs), and electroporated cells such as, but not limited to, from MAXCYTE® (Gaithersburg, Md.) and from ERYTECH® (Lyon, France) to deliver modified RNA. Examples of use of red blood cells, viral particles and electroporated cells to deliver payloads other than mmRNA have been documented (Godfrin et al., Expert Opin Biol Ther. 2012 12:127-133; Fang et al., Expert Opin Biol Ther. 2012 12:385-389; Hu et al., Proc Natl Acad Sci USA. 2011 108:10980-10985; Lund et al., Pharm Res. 2010 27:400-420; Huckriede et al., J Liposome Res. 2007; 17:39-47; Cusi, Hum Vaccin. 2006 2:1-7; de Jonge et al., Gene Ther. 2006 13:400-411; all of which are herein incorporated by reference in its entirety). The modified nucleic acid molecules and mmRNA may be delivered in synthetic VLPs synthesized by the methods described in International Pub No. WO2011085231 and US Pub No. 20110171248, each of which are herein incorporated by reference in their entireties.

[0498] Cell-based formulations of the modified nucleic acid molecules and mmRNA of the invention may be used to ensure cell transfection (e.g., in the cellular carrier), alter the biodistribution of the modified nucleic acid molecule or mmRNA (e.g., by targeting the cell carrier to specific tissues or cell types), and/or increase the translation of encoded protein.

Introduction into Cells

[0499] A variety of methods are known in the art and suitable for introduction of nucleic acid into a cell, including viral and non-viral mediated techniques. Examples of typical non-viral mediated techniques include, but are not limited to, electroporation, calcium phosphate mediated transfer, nucleofection, sonoporation, heat shock, magnetofection, liposome mediated transfer, microinjection, microprojectile mediated transfer (nanoparticles), cationic polymer mediated transfer (DEAE-dextran, polyethylenimine, polyethylene glycol (PEG) and the like) or cell fusion.

[0500] The technique of sonoporation, or cellular sonication, is the use of sound (e.g., ultrasonic frequencies) for modifying the permeability of the cell plasma membrane. Sonoporation methods are known to those in the art and are taught for example as it relates to bacteria in US Patent Publication 20100196983 and as it relates to other cell types in, for example, US Patent Publication 20100009424, each of which are incorporated herein by reference in their entirety.

[0501] Electroporation techniques are also well known in the art. In one embodiment, modified nucleic acid molecules or mmRNA may be delivered by electroporation as described in Example 8.

### Hyaluronidase

[0502] The intramuscular or subcutaneous localized injection of modified nucleic acid molecules or mmRNA of the invention can include hyaluronidase, which catalyzes the hydrolysis of hyaluronan. By catalyzing the hydrolysis of hyaluronan, a constituent of the interstitial barrier, hyaluronidase lowers the viscosity of hyaluronan, thereby increasing tissue permeability (Frost, Expert Opin. Drug Deliv. (2007) 4:427-440; herein incorporated by reference in its entirety). It is useful to speed their dispersion and systemic distribution of encoded proteins produced by transfected cells. Alternatively, the hyaluronidase can be used to increase the number of cells exposed to a modified nucleic acid molecule or mmRNA of the invention administered intramuscularly or subcutaneously.

### Nanoparticle Mimics

[0503] The modified nucleic acid molecules and mmRNA of the invention may be encapsulated within and/or absorbed to a nanoparticle mimic. A nanoparticle mimic can mimic the delivery function organisms or particles such as, but not limited to, pathogens, viruses, bacteria, fungus, parasites, prions and cells. As a non-limiting example the modified mRNA of the invention may be encapsulated in a non-viron particle which can mimic the delivery function of a virus (see International Pub. No. WO2012006376 herein incorporated by reference in its entirety).

### Nanotubes

[0504] The modified nucleic acid molecules or mmRNA of the invention can be attached or otherwise bound to at least one nanotube such as, but not limited to, rosette nanotubes, rosette nanotubes having twin bases with a linker, carbon nanotubes and/or single-walled carbon nanotubes, The modified nucleic acid molecules or mmRNA may be bound to the nanotubes through forces such as, but not limited to, steric, ionic, covalent and/or other forces.

[0505] In one embodiment, the nanotube can release one or more modified nucleic acid molecule or mmRNA into cells. The size and/or the surface structure of at least one nanotube may be altered so as to govern the interaction of the nanotubes within the body and/or to attach or bind to the modified nucleic acid molecule or mmRNA disclosed herein. In one embodiment, the building block and/or the functional groups attached to the building block of the at least one nanotube may be altered to adjust the dimensions and/or properties of the nanotube. As a non-limiting example, the length of the nanotubes may be altered to hinder the nanotubes from passing through the holes in the walls of normal blood vessels but still small enough to pass through the larger holes in the blood vessels of tumor tissue.

[0506] In one embodiment, at least one nanotube may also be coated with delivery enhancing compounds including polymers, such as, but not limited to, polyethylene glycol. In another embodiment, at least one nanotube and/or the modified mRNA may be mixed with pharmaceutically acceptable excipients and/or delivery vehicles.

[0507] In one embodiment, the modified mRNA are attached and/or otherwise bound to at least one rosette nanotube. The rosette nanotubes may be formed by a process known in the art and/or by the process described in International Publication No. WO2012094304, herein incorporated by reference in its entirety. At least one modified mRNA may be attached and/or otherwise bound to at least one rosette nanotube by a process as described in International Publication No. WO2012094304, herein incorporated by reference in its entirety, where rosette nanotubes or modules forming rosette nanotubes are mixed in aqueous media with at least one modified mRNA under conditions which may cause at least one modified mRNA to attach or otherwise bind to the rosette nanotubes.

[0508] In one embodiment, the modified nucleic acid molecule or mmRNA may be attached to and/or otherwise bound to at least one carbon nanotube. As a non-limiting example, the modified nucleic acid molecule or mmRNA may be bound to a linking agent and the linked agent may be bound to the carbon nanotube (See e.g., U.S. Pat. No. 8,246,995; herein incorporated by reference in its entirety). The carbon nanotube may be a single-walled nanotube (See e.g., U.S. Pat. No. 8,246,995; herein incorporated by reference in its entirety).

### Conjugates

[0509] The modified nucleic acids molecules and mmRNA of the invention include conjugates, such as a modified nucleic acid molecule or mmRNA covalently linked to a carrier or targeting group, or including two encoding regions that together produce a fusion protein (e.g., bearing a targeting group and therapeutic protein or peptide).

[0510] The conjugates of the invention include a naturally occurring substance, such as a protein (e.g., human serum albumin (HSA), low-density lipoprotein (LDL), high-density lipoprotein (HDL), or globulin); an carbohydrate (e.g., a dextran, pullulan, chitin, chitosan, inulin, cyclodextrin or hyaluronic acid); or a lipid. The ligand may also be a recombinant or synthetic molecule, such as a synthetic polymer, e.g., a synthetic polyamino acid, an oligonucleotide (e.g. an aptamer). Examples of polyamino acids include polyamino acid is a polylysine (PLL), poly L-aspartic acid, poly L-glutamic acid, styrene-maleic acid anhydride copolymer, poly(L-lactide-co-glycolide) copolymer, divinyl ether-maleic anhydride copolymer, N-(2-hydroxypropyl)methacrylamide copolymer (HMPA), polyethylene glycol (PEG), polyvinyl alcohol (PVA), polyurethane, poly(2-ethylacrylic acid), N-isopropylacrylamide polymers, or polyphosphazine. Example of polyamines include: polyethylenimine, polylysine (PLL), spermine, spermidine, polyamine, pseudopeptide-polyamine, peptidomimetic polyamine, dendrimer polyamine, arginine, amidine, protamine, cationic lipid, cationic porphyrin, quaternary salt of a polyamine, or an alpha helical peptide.

[0511] Representative U.S. patents that teach the preparation of polynucleotide conjugates, particularly to RNA, include, but are not limited to, U.S. Pat. Nos. 4,828,979; 4,948,882; 5,218,105; 5,525,465; 5,541,313; 5,545,730; 5,552,538; 5,578,717, 5,580,731; 5,591,584; 5,109,124; 5,118,802; 5,138,045; 5,414,077; 5,486,603; 5,512,439; 5,578,718; 5,608,046; 4,587,044; 4,605,735; 4,667,025; 4,762,779; 4,789,737; 4,824,941; 4,835,263; 4,876,335; 4,904,582; 4,958,013; 5,082,830; 5,112,963; 5,214,136; 5,082,830; 5,112,963; 5,214,136; 5,245,022; 5,254,469; 5,258,506; 5,262,536; 5,272,250; 5,292,873; 5,317,098; 5,371,241, 5,391,723; 5,416,203, 5,451,463; 5,510,475; 5,512,667; 5,514,785; 5,565,552; 5,567,810; 5,574,142; 5,585,481; 5,587,371; 5,595,726; 5,597,696; 5,599,923; 5,599,928 and 5,688,941; 6,294,664; 6,320,017; 6,576,752; 6,783,931; 6,900,297; 7,037,646; each of which is herein incorporated by reference in their entireties.

[0512] In one embodiment, the conjugate of the present invention may function as a carrier for the modified nucleic acid molecules and mmRNA of the present invention. The conjugate may comprise a cationic polymer such as, but not limited to, polyamine, polylysine, polyalkylenimine, and polyethylenimine which may be grafted to with poly(ethylene glycol). As a non-limiting example, the conjugate may be similar to the polymeric conjugate and the method of synthesizing the polymeric conjugate described in U.S. Pat. No. 6,586,524 herein incorporated by reference in its entirety.

[0513] The conjugates can also include targeting groups, e.g., a cell or tissue targeting agent, e.g., a lectin, glycoprotein, lipid or protein, e.g., an antibody, that binds to a specified cell type such as a kidney cell. A targeting group can be a thyrotropin, melanotropin, lectin, glycoprotein, surfactant protein A, Mucin carbohydrate, multivalent lactose, multivalent galactose, N-acetyl-galactosamine, N-acetyl-gulucosamine multivalent mannose, multivalent fucose, glycosylated polyaminoacids, multivalent galactose, transferrin, bisphosphonate, polyglutamate, polyaspartate, a lipid, cholesterol, a steroid, bile acid, folate, vitamin B12, biotin, an RGD peptide, an RGD peptide mimetic or an aptamer.

[0514] Targeting groups can be proteins, e.g., glycoproteins, or peptides, e.g., molecules having a specific affinity for a co-ligand, or antibodies e.g., an antibody, that binds to a specified cell type such as a cancer cell, endothelial cell, or bone cell. Targeting groups may also include hormones and hormone receptors. They can also include non-peptidic species, such as lipids, lectins, carbohydrates, vitamins, cofactors, multivalent lactose, multivalent galactose, N-acetyl-galactosamine, N-acetyl-gulucosamine multivalent mannose, multivalent fucose, or aptamers. The ligand can be, for example, a lipopolysaccharide, or an activator of p38 MAP kinase.

[0515] The targeting group can be any ligand that is capable of targeting a specific receptor. Examples include, without limitation, folate, GalNAc, galactose, mannose, mannose-6P, apatamers, integrin receptor ligands, chemokine receptor ligands, transferrin, biotin, serotonin receptor ligands, PSMA, endothelin, GCPII, somatostatin, LDL, and HDL ligands. In particular embodiments, the targeting group is an aptamer. The aptamer can be unmodified or have any combination of modifications disclosed herein.

[0516] In one embodiment, pharmaceutical compositions of the present invention may include chemical modifications such as, but not limited to, modifications similar to locked nucleic acids.

[0517] Representative U.S. patents that teach the preparation of locked nucleic acid (LNA) such as those from Santaris, include, but are not limited to, the following: U.S. Pat. Nos. 6,268,490; 6,670,461; 6,794,499; 6,998,484; 7,053,207; 7,084,125; and 7,399,845, each of which is herein incorporated by reference in its entirety.

[0518] Representative U.S. patents that teach the preparation of PNA compounds include, but are not limited to, U.S. Pat. Nos. 5,539,082; 5,714,331; and 5,719,262, each of which is herein incorporated by reference. Further teaching of PNA compounds can be found, for example, in Nielsen et al., Science, 1991, 254, 1497-1500.

[0519] Some embodiments featured in the invention include modified nucleic acids or mmRNA with phosphorothioate backbones and oligonucleosides with other modified backbones, and in particular —CH₂—NH—CH₂—, —CH₂—N(CH₃)—O—CH₂—[known as a methylene (methylimino) or MMI backbone], —CH₂—O—N(CH₃)—CH₂—, —CH₂—N(CH₃)—N(CH₃)—CH₂— and —N(CH₃)—CH₂—CH₂—[wherein the native phosphodiester backbone is represented as —O—P(O)₂-O—CH₂—] of the above-referenced U.S. Pat. No. 5,489,677, and the amide backbones of the above-referenced U.S. Pat. No. 5,602,240. In some embodiments, the polynucleotides featured herein have morpholino backbone structures of the above-referenced U.S. Pat. No. 5,034,506.

[0520] Modifications at the 2′ position may also aid in delivery. Preferably, modifications at the 2′ position are not located in a polypeptide-coding sequence, i.e., not in a translatable region. Modifications at the 2′ position may be located in a 5′ UTR, a 3′ UTR and/or a tailing region. Modifications at the 2′ position can include one of the following at the 2′ position: H (i.e., 2′-deoxy); F; O-, S-, or N-alkyl; O-, S-, or N-alkenyl; O-, S- or N-alkynyl; or O-alkyl-O-alkyl, wherein the alkyl, alkenyl and alkynyl may be substituted or unsubstituted C₁ to C₁₀ alkyl or C2 to C₁₀ alkenyl and alkynyl. Exemplary suitable modifications include O[(CH₂)ₙO]ₘCH₃, O(CH₂).ₙOCH₃, O(CH₂)ₙNH₂, O(CH₂)ₙCH₃, O(CH₂)ₙONH₂, and O(CH₂)ₙON[(CH₂)ₙCH₃)]₂, where n and m are from 1 to about 10. In other embodiments, the modified nucleic acids or mmRNA include one of the following at the 2′ position: C₁ to C₁₀ lower alkyl, substituted lower alkyl, alkaryl, aralkyl, O-alkaryl or O-aralkyl, SH, SCH₃, OCN, Cl, Br, CN, CF₃, OCF₃, SOCH3, SO₂CH₃, ONO₂, NO₂, N₃, NH₂, heterocycloalkyl, heterocycloalkaryl, aminoalkylamino, polyalkylamino, substituted silyl, an RNA cleaving group, a reporter group, an intercalator, a group for improving the pharmacokinetic properties, or a group for improving the pharmacodynamic properties, and other substituents having similar properties. In some embodiments, the modification includes a 2′-methoxyethoxy (2′-O—CH₂CH₂OCH₃, also known as 2′-O-(2-methoxyethyl) or 2′-MOE) (Martin et al., Helv. Chim. Acta, 1995, 78:486-504) i.e., an alkoxy-alkoxy group. Another exemplary modification is 2′-dimethylaminooxyethoxy, i.e., a O(CH₂)₂ON(CH₃)₂ group, also known as 2′-DMAOE, as described in examples herein below, and 2′-dimethylaminoethoxyethoxy (also known in the art as 2′-O-dimethylaminoethoxyethyl or 2′-DMAEOE), i.e., 2′-O—CH₂—O—CH₂—N(CH₂)₂, also described in examples herein below. Other modifications include 2′-methoxy (2′-OCH₃), 2′-aminopropoxy (2′-OCH₂CH₂CH₂NH₂) and 2′-fluoro (2′-F). Similar modifications may also be made at other positions, particularly the 3′ position of the sugar on the 3′ terminal nucleotide or in 2′-5′ linked dsRNAs and the 5′ position of 5′ terminal nucleotide. Polynucleotides of the invention may also have sugar mimetics such as cyclobutyl moieties in place of the pentofuranosyl sugar. Representative U.S. patents that teach the preparation of such modified sugar structures include, but are not limited to, U.S. Pat. Nos. 4,981,957; 5,118,800; 5,319,080; 5,359,044; 5,393,878; 5,446,137; 5,466,786; 5,514,785; 5,519,134; 5,567,811; 5,576,427; 5,591,722; 5,597,909; 5,610,300; 5,627,053; 5,639,873; 5,646,265; 5,658,873; 5,670,633; and 5,700,920 and each of which is herein incorporated by reference.

[0521] In still other embodiments, the modified nucleic acid molecule or mmRNA is covalently conjugated to a cell-penetrating polypeptide. The cell-penetrating peptide may also include a signal sequence. The conjugates of the invention can be designed to have increased stability; increased cell transfection; and/or altered the biodistribution (e.g., targeted to specific tissues or cell types).

### Self-Assembled Nanoparticles

### Nucleic Acid Self-Assembled Nanoparticles

[0522] Self-assembled nanoparticles have a well-defined size which may be precisely controlled as the nucleic acid strands may be easily reprogrammable. For example, the optimal particle size for a cancer-targeting nanodelivery carrier is 20-100 nm as a diameter greater than 20 nm avoids renal clearance and enhances delivery to certain tumors through enhanced permeability and retention effect. Using self-assembled nucleic acid nanoparticles a single uniform population in size and shape having a precisely controlled spatial orientation and density of cancer-targeting ligands for enhanced delivery. As a non-limiting example, oligonucleotide nanoparticles were prepared using programmable self-assembly of short DNA fragments and therapeutic siRNAs. These nanoparticles are molecularly identical with controllable particle size and target ligand location and density. The DNA fragments and siRNAs self-assembled into a one-step reaction to generate DNA/siRNA tetrahedral nanoparticles for targeted in vivo delivery. (Lee et al., Nature Nanotechnology 2012 7:389-393; herein incorporated by reference in its entirety).

[0523] In one embodiment, the modified nucleic acid molecules and mmRNA disclosed herein may be formulated as self-assembled nanoparticles. As a non-limiting example, nucleic acids may be used to make nanoparticles which may be used in a delivery system for the modified nucleic acid molecules and/or mmRNA of the present invention (See e.g., International Pub. No. WO2012125987; herein incorporated by reference in its entirety).

[0524] In one embodiment, the nucleic acid self-assembled nanoparticles may comprise a core of the modified nucleic acid molecules or mmRNA disclosed herein and a polymer shell. The polymer shell may be any of the polymers described herein and are known in the art. In an additional embodiment, the polymer shell may be used to protect the modified nucleic acid molecules and mmRNA in the core.

### Polymer-Based Self-Assembled Nanoparticles

[0525] Polymers may be used to form sheets which self-assembled into nanoparticles. These nanoparticles may be used to deliver the modified nucleic acids and mmRNA of the present invention. In one embodiment, these self-assembled nanoparticles may be microsponges formed of long polymers of RNA hairpins which form into crystalline ‘pleated’ sheets before self-assembling into microsponges. These microsponges are densely-packed sponge like microparticles which may function as an efficient carrier and may be able to deliver cargo to a cell. The microsponges may be from 1 um to 300 nm in diameter. The microsponges may be complexed with other agents known in the art to form larger microsponges. As a non-limiting example, the microsponge may be complexed with an agent to form an outer layer to promote cellular uptake such as polycation polyethyleneime (PEI). This complex can form a 250-nm diameter particle that can remain stable at high temperatures (150° C.) (Grabow and Jaegar, Nature Materials 2012, 11:269-269; herein incorporated by reference in its entirety). Additionally these microsponges may be able to exhibit an extraordinary degree of protection from degradation by ribonucleases.

[0526] In another embodiment, the polymer-based self-assembled nanoparticles such as, but not limited to, microsponges, may be fully programmable nanoparticles. The geometry, size and stoichiometry of the nanoparticle may be precisely controlled to create the optimal nanoparticle for delivery of cargo such as, but not limited to, modified nucleic acid molecules and mmRNA.

[0527] In one embodiment, the polymer based nanoparticles may comprise a core of the modified nucleic acid molecules and mmRNA disclosed herein and a polymer shell. The polymer shell may be any of the polymers described herein and are known in the art. In an additional embodiment, the polymer shell may be used to protect the modified nucleic acid molecules and mmRNA in the core.

### Inorganic Nanoparticles

[0528] The modified nucleic acid molecules or mmRNAs of the present invention may be formulated in inorganic nanoparticles (U.S. Pat. No. 8,257,745, herein incorporated by reference in its entirety). The inorganic nanoparticles may include, but are not limited to, clay substances that are water swellable. As a non-limiting example, the inorganic nanoparticle may include synthetic smectite clays which are made from simple silicates (See e.g., U.S. Pat. Nos. 5,585,108 and 8,257,745 each of which are herein incorporated by reference in their entirety).

[0529] In one embodiment, the inorganic nanoparticles may comprise a core of the modified nucleic acids disclosed herein and a polymer shell. The polymer shell may be any of the polymers described herein and are known in the art. In an additional embodiment, the polymer shell may be used to protect the modified nucleic acids in the core.

### Semi-Conductive and Metallic Nanoparticles

[0530] The modified nucleic acid molecules or mmRNAs of the present invention may be formulated in water-dispersible nanoparticle comprising a semiconductive or metallic material (U.S. Pub. No. 20120228565; herein incorporated by reference in its entirety) or formed in a magnetic nanoparticle (U.S. Pub. No. 20120265001 and 20120283503; each of which is herein incorporated by reference in its entirety). The water-dispersible nanoparticles may be hydrophobic nanoparticles or hydrophilic nanoparticles.

[0531] In one embodiment, the semi-conductive and/or metallic nanoparticles may comprise a core of the modified nucleic acids disclosed herein and a polymer shell. The polymer shell may be any of the polymers described herein and are known in the art. In an additional embodiment, the polymer shell may be used to protect the modified nucleic acids in the core.

### Gels and Hydrogels

[0532] In one embodiment, the modified mRNA disclosed herein may be encapsulated into any hydrogel known in the art which may form a gel when injected into a subject. Hydrogels are a network of polymer chains that are hydrophilic, and are sometimes found as a colloidal gel in which water is the dispersion medium. Hydrogels are highly absorbent (they can contain over 99% water) natural or synthetic polymers. Hydrogels also possess a degree of flexibility very similar to natural tissue, due to their significant water content. The hydrogel described herein may used to encapsulate lipid nanoparticles which are biocompatible, biodegradable and/or porous.

[0533] As a non-limiting example, the hydrogel may be an aptamer-functionalized hydrogel. The aptamer-functionalized hydrogel may be programmed to release one or more modified nucleic acid molecules and/or mmRNA using nucleic acid hybridization. (Battig et al., J. Am. Chem. Society. 2012 134:12410-12413; herein incorporated by reference in its entirety).

[0534] As another non-limiting example, the hydrogel may be a shaped as an inverted opal. The opal hydrogels exhibit higher swelling ratios and the swelling kinetics is an order of magnitude faster as well. Methods of producing opal hydrogels and description of opal hydrogels are described in International Pub. No. WO2012148684, herein incorporated by reference in its entirety.

[0535] In yet another non-limiting example, the hydrogel may be an antibacterial hydrogel. The antibacterial hydrogel may comprise a pharmaceutical acceptable salt or organic material such as, but not limited to pharmaceutical grade and/or medical grade silver salt and aloe vera gel or extract. (International Pub. No. WO2012151438, herein incorporated by reference in its entirety).

[0536] In one embodiment, the modified mRNA may be encapsulated in a lipid nanoparticle and then the lipid nanoparticle may be encapsulated into a hydrogel.

[0537] In one embodiment, the modified mRNA disclosed herein may be encapsulated into any gel known in the art. As a non-limiting example the gel may be a fluorouracil injectable gel or a fluorouracil injectable gel containing a chemical compound and/or drug known in the art. As another example, the modified mRNA may be encapsulated in a fluorouracil gel containing epinephrine (See e.g., Smith et al. Cancer Chemotherapy and Pharmacology, 1999 44(4):267-274; herein incorporated by reference in its entirety).

[0538] In one embodiment, the modified nucleic acid molecules and/or mmRNA disclosed herein may be encapsulated into a fibrin gel, fibrin hydrogel or fibrin glue. In another embodiment, the modified nucleic acid molecules and/or mmRNA may be formulated in a lipid nanoparticle or a rapidly eliminated lipid nanoparticle prior to being encapsulated into a fibrin gel, fibrin hydrogel or a fibrin glue. In yet another embodiment, the modified nucleic acid molecules and/or mmRNA may be formulated as a lipoplex prior to being encapsulated into a fibrin gel, hydrogel or a fibrin glue. Fibrin gels, hydrogels and glues comprise two components, a fibrinogen solution and a thrombin solution which is rich in calcium (See e.g., Spicer and Mikos, Journal of Controlled Release 2010. 148: 49-55; Kidd et al. Journal of Controlled Release 2012. 157:80-85; each of which is herein incorporated by reference in its entirety). The concentration of the components of the fibrin gel, hydrogel and/or glue can be altered to change the characteristics, the network mesh size, and/or the degradation characteristics of the gel, hydrogel and/or glue such as, but not limited to changing the release characteristics of the fibrin gel, hydrogel and/or glue. (See e.g., Spicer and Mikos, Journal of Controlled Release 2010. 148: 49-55; Kidd et al. Journal of Controlled Release 2012. 157:80-85; Catelas et al. Tissue Engineering 2008. 14:119-128; each of which is herein incorporated by reference in its entirety). This feature may be advantageous when used to deliver the modified mRNA disclosed herein. (See e.g., Kidd et al. Journal of Controlled Release 2012. 157:80-85; Catelas et al. Tissue Engineering 2008. 14:119-128; each of which is herein incorporated by reference in its entirety). Cations and Anions

[0539] Formulations of modified nucleic acid molecules disclosed herein may include cations or anions. In one embodiment, the formulations include metal cations such as, but not limited to, Zn2+, Ca2+, Cu2+, Mg+ and combinations thereof. As a non-limiting example, formulations may include polymers and a modified mRNA complexed with a metal cation (See e.g., U.S. Pat. Nos. 6,265,389 and 6,555,525, each of which is herein incorporated by reference in its entirety).

### Molded Nanoparticles and Microparticles

[0540] The modified nucleic acid molecules and/or mmRNA disclosed herein may be formulated in nanoparticles and/or microparticles. These nanoparticles and/or microparticles may be molded into any size shape and chemistry. As an example, the nanoparticles and/or microparticles may be made using the PRINT® technology by LIQUIDA TECHNOLOGIES® (Morrisville, N.C.) (See e.g., International Pub. No. WO2007024323; herein incorporated by reference in its entirety).

[0541] In one embodiment, the molded nanoparticles may comprise a core of the modified nucleic acid molecules and/or mmRNA disclosed herein and a polymer shell. The polymer shell may be any of the polymers described herein and are known in the art. In an additional embodiment, the polymer shell may be used to protect the modified nucleic acid molecules and/or mmRNA in the core.

### NanoJackets and NanoLiposomes

[0542] The modified nucleic acid molecules and/or mmRNA disclosed herein may be formulated in NanoJackets and NanoLiposomes by Keystone Nano (State College, Pa.). NanoJackets are made of compounds that are naturally found in the body including calcium, phosphate and may also include a small amount of silicates. Nanojackets may range in size from 5 to 50 nm and may be used to deliver hydrophilic and hydrophobic compounds such as, but not limited to, modified nucleic acid molecules and/or mmRNA.

[0543] NanoLiposomes are made of lipids such as, but not limited to, lipids which naturally occur in the body. NanoLiposomes may range in size from 60-80 nm and may be used to deliver hydrophilic and hydrophobic compounds such as, but not limited to, modified nucleic acid molecules and/or mmRNA. In one aspect, the modified nucleic acids disclosed herein are formulated in a NanoLiposome such as, but not limited to, Ceramide NanoLiposomes.

### Excipients

[0544] Pharmaceutical formulations may additionally comprise a pharmaceutically acceptable excipient, which, as used herein, includes, but are not limited to, any and all solvents, dispersion media, diluents, or other liquid vehicles, dispersion or suspension aids, surface active agents, isotonic agents, thickening or emulsifying agents, preservatives, solid binders, lubricants and the like, as suited to the particular dosage form desired. Various excipients for formulating pharmaceutical compositions and techniques for preparing the composition are known in the art (see Remington: The Science and Practice of Pharmacy, 21^{st} Edition, A. R. Gennaro, Lippincott, Williams & Wilkins, Baltimore, Md., 2006; incorporated herein by reference in its entirety). The use of a conventional excipient medium may be contemplated within the scope of the present disclosure, except insofar as any conventional excipient medium may be incompatible with a substance or its derivatives, such as by producing any undesirable biological effect or otherwise interacting in a deleterious manner with any other component(s) of the pharmaceutical composition.

[0545] In some embodiments, a pharmaceutically acceptable excipient may be at least 95%, at least 96%, at least 97%, at least 98%, at least 99%, or 100% pure. In some embodiments, an excipient may be approved for use for humans and for veterinary use. In some embodiments, an excipient may be approved by United States Food and Drug Administration. In some embodiments, an excipient may be of pharmaceutical grade. In some embodiments, an excipient may meet the standards of the United States Pharmacopoeia (USP), the European Pharmacopoeia (EP), the British Pharmacopoeia, and/or the International Pharmacopoeia.

[0546] Pharmaceutically acceptable excipients used in the manufacture of pharmaceutical compositions include, but are not limited to, inert diluents, dispersing and/or granulating agents, surface active agents and/or emulsifiers, disintegrating agents, binding agents, preservatives, buffering agents, lubricating agents, and/or oils. Such excipients may optionally be included in pharmaceutical formulations. The composition may also include excipients such as cocoa butter and suppository waxes, coloring agents, coating agents, sweetening, flavoring, and/or perfuming agents.

[0547] Exemplary diluents include, but are not limited to, calcium carbonate, sodium carbonate, calcium phosphate, dicalcium phosphate, calcium sulfate, calcium hydrogen phosphate, sodium phosphate lactose, sucrose, cellulose, microcrystalline cellulose, kaolin, mannitol, sorbitol, inositol, sodium chloride, dry starch, cornstarch, powdered sugar, etc., and/or combinations thereof

[0548] Exemplary granulating and/or dispersing agents include, but are not limited to, potato starch, corn starch, tapioca starch, sodium starch glycolate, clays, alginic acid, guar gum, citrus pulp, agar, bentonite, cellulose and wood products, natural sponge, cation-exchange resins, calcium carbonate, silicates, sodium carbonate, cross-linked poly(vinyl-pyrrolidone) (crospovidone), sodium carboxymethyl starch (sodium starch glycolate), carboxymethyl cellulose, cross-linked sodium carboxymethyl cellulose (croscarmellose), methylcellulose, pregelatinized starch (starch 1500), microcrystalline starch, water insoluble starch, calcium carboxymethyl cellulose, magnesium aluminum silicate (VEEGUM®), sodium lauryl sulfate, quaternary ammonium compounds, etc., and/or combinations thereof

[0549] Exemplary surface active agents and/or emulsifiers include, but are not limited to, natural emulsifiers (e.g. acacia, agar, alginic acid, sodium alginate, tragacanth, chondrux, cholesterol, xanthan, pectin, gelatin, egg yolk, casein, wool fat, cholesterol, wax, and lecithin), colloidal clays (e.g. bentonite [aluminum silicate] and VEEGUM® [magnesium aluminum silicate]), long chain amino acid derivatives, high molecular weight alcohols (e.g. stearyl alcohol, cetyl alcohol, oleyl alcohol, triacetin monostearate, ethylene glycol distearate, glyceryl monostearate, and propylene glycol monostearate, polyvinyl alcohol), carbomers (e.g. carboxy polymethylene, polyacrylic acid, acrylic acid polymer, and carboxyvinyl polymer), carrageenan, cellulosic derivatives (e.g. carboxymethylcellulose sodium, powdered cellulose, hydroxymethyl cellulose, hydroxypropyl cellulose, hydroxypropyl methylcellulose, methylcellulose), sorbitan fatty acid esters (e.g. polyoxyethylene sorbitan monolaurate [TWEEN®20], polyoxyethylene sorbitan [TWEEN® 60], polyoxyethylene sorbitan monooleate [TWEEN®80], sorbitan monopalmitate [SPAN®40], sorbitan monostearate [SPAN®60], sorbitan tristearate [SPAN®65], glyceryl monooleate, sorbitan monooleate [SPAN®80]), polyoxyethylene esters (e.g. polyoxyethylene monostearate [MYRJ® 45], polyoxyethylene hydrogenated castor oil, polyethoxylated castor oil, polyoxymethylene stearate, and SOLUTOL®), sucrose fatty acid esters, polyethylene glycol fatty acid esters (e.g. CREMOPHOR®), polyoxyethylene ethers, (e.g. polyoxyethylene lauryl ether [BRIJ® 30]), poly(vinyl-pyrrolidone), diethylene glycol monolaurate, triethanolamine oleate, sodium oleate, potassium oleate, ethyl oleate, oleic acid, ethyl laurate, sodium lauryl sulfate, PLUORINC®F 68, POLOXAMER® 188, cetrimonium bromide, cetylpyridinium chloride, benzalkonium chloride, docusate sodium, etc. and/or combinations thereof

[0550] Exemplary binding agents include, but are not limited to, starch (e.g. cornstarch and starch paste); gelatin; sugars (e.g. sucrose, glucose, dextrose, dextrin, molasses, lactose, lactitol, mannitol); natural and synthetic gums (e.g. acacia, sodium alginate, extract of Irish moss, panwar gum, ghatti gum, mucilage of isapol husks, carboxymethylcellulose, methylcellulose, ethylcellulose, hydroxyethylcellulose, hydroxypropyl cellulose, hydroxypropyl methylcellulose, microcrystalline cellulose, cellulose acetate, poly(vinyl-pyrrolidone), magnesium aluminum silicate (VEEGUM®), and larch arabogalactan); alginates; polyethylene oxide; polyethylene glycol; inorganic calcium salts; silicic acid; polymethacrylates; waxes; water; alcohol; etc.; and combinations thereof

[0551] Exemplary preservatives may include, but are not limited to, antioxidants, chelating agents, antimicrobial preservatives, antifungal preservatives, alcohol preservatives, acidic preservatives, and/or other preservatives. Exemplary antioxidants include, but are not limited to, alpha tocopherol, ascorbic acid, acorbyl palmitate, butylated hydroxyanisole, butylated hydroxytoluene, monothioglycerol, potassium metabisulfite, propionic acid, propyl gallate, sodium ascorbate, sodium bisulfite, sodium metabisulfite, and/or sodium sulfite. Exemplary chelating agents include ethylenediaminetetraacetic acid (EDTA), citric acid monohydrate, disodium edetate, dipotassium edetate, edetic acid, fumaric acid, malic acid, phosphoric acid, sodium edetate, tartaric acid, and/or trisodium edetate. Exemplary antimicrobial preservatives include, but are not limited to, benzalkonium chloride, benzethonium chloride, benzyl alcohol, bronopol, cetrimide, cetylpyridinium chloride, chlorhexidine, chlorobutanol, chlorocresol, chloroxylenol, cresol, ethyl alcohol, glycerin, hexetidine, imidurea, phenol, phenoxyethanol, phenylethyl alcohol, phenylmercuric nitrate, propylene glycol, and/or thimerosal. Exemplary antifungal preservatives include, but are not limited to, butyl paraben, methyl paraben, ethyl paraben, propyl paraben, benzoic acid, hydroxybenzoic acid, potassium benzoate, potassium sorbate, sodium benzoate, sodium propionate, and/or sorbic acid. Exemplary alcohol preservatives include, but are not limited to, ethanol, polyethylene glycol, phenol, phenolic compounds, bisphenol, chlorobutanol, hydroxybenzoate, and/or phenylethyl alcohol. Exemplary acidic preservatives include, but are not limited to, vitamin A, vitamin C, vitamin E, beta-carotene, citric acid, acetic acid, dehydroacetic acid, ascorbic acid, sorbic acid, and/or phytic acid. Other preservatives include, but are not limited to, tocopherol, tocopherol acetate, deteroxime mesylate, cetrimide, butylated hydroxyanisol (BHA), butylated hydroxytoluened (BHT), ethylenediamine, sodium lauryl sulfate (SLS), sodium lauryl ether sulfate (SLES), sodium bisulfite, sodium metabisulfite, potassium sulfite, potassium metabisulfite, GLYDANT PLUS®, PHENONIP®, methylparaben, GERMALL® 115, GERMABEN®II, NEOLONE™, KATHON™, and/or EUXYL®.

[0552] Exemplary buffering agents include, but are not limited to, citrate buffer solutions, acetate buffer solutions, phosphate buffer solutions, ammonium chloride, calcium carbonate, calcium chloride, calcium citrate, calcium glubionate, calcium gluceptate, calcium gluconate, d-gluconic acid, calcium glycerophosphate, calcium lactate, propanoic acid, calcium levulinate, pentanoic acid, dibasic calcium phosphate, phosphoric acid, tribasic calcium phosphate, calcium hydroxide phosphate, potassium acetate, potassium chloride, potassium gluconate, potassium mixtures, dibasic potassium phosphate, monobasic potassium phosphate, potassium phosphate mixtures, sodium acetate, sodium bicarbonate, sodium chloride, sodium citrate, sodium lactate, dibasic sodium phosphate, monobasic sodium phosphate, sodium phosphate mixtures, tromethamine, magnesium hydroxide, aluminum hydroxide, alginic acid, pyrogen-free water, isotonic saline, Ringer's solution, ethyl alcohol, etc., and/or combinations thereof

[0553] Exemplary lubricating agents include, but are not limited to, magnesium stearate, calcium stearate, stearic acid, silica, talc, malt, glyceryl behanate, hydrogenated vegetable oils, polyethylene glycol, sodium benzoate, sodium acetate, sodium chloride, leucine, magnesium lauryl sulfate, sodium lauryl sulfate, etc., and combinations thereof

[0554] Exemplary oils include, but are not limited to, almond, apricot kernel, avocado, babassu, bergamot, black current seed, borage, cade, camomile, canola, caraway, carnauba, castor, cinnamon, cocoa butter, coconut, cod liver, coffee, corn, cotton seed, emu, eucalyptus, evening primrose, fish, flaxseed, geraniol, gourd, grape seed, hazel nut, hyssop, isopropyl myristate, jojoba, kukui nut, lavandin, lavender, lemon, litsea cubeba, macademia nut, mallow, mango seed, meadowfoam seed, mink, nutmeg, olive, orange, orange roughy, palm, palm kernel, peach kernel, peanut, poppy seed, pumpkin seed, rapeseed, rice bran, rosemary, safflower, sandalwood, sasquana, savoury, sea buckthorn, sesame, shea butter, silicone, soybean, sunflower, tea tree, thistle, tsubaki, vetiver, walnut, and wheat germ oils. Exemplary oils include, but are not limited to, butyl stearate, caprylic triglyceride, capric triglyceride, cyclomethicone, diethyl sebacate, dimethicone 360, isopropyl myristate, mineral oil, octyldodecanol, oleyl alcohol, silicone oil, and/or combinations thereof

[0555] Excipients such as cocoa butter and suppository waxes, coloring agents, coating agents, sweetening, flavoring, and/or perfuming agents can be present in the composition, according to the judgment of the formulator.

### Delivery

[0556] The present disclosure encompasses the delivery of modified nucleic acid molecules or mmRNA for any of therapeutic, pharmaceutical, diagnostic or imaging by any appropriate route taking into consideration likely advances in the sciences of drug delivery. Delivery may be naked or formulated.

### Naked Delivery

[0557] The modified nucleic acid molecules or mmRNA of the present invention may be delivered to a cell naked. As used herein in, “naked” refers to delivering modified nucleic acid molecules or mmRNA free from agents which promote transfection. For example, the modified nucleic acid molecules or mmRNA delivered to the cell may contain no modifications. The naked modified nucleic acid molecules or mmRNA may be delivered to the cell using routes of administration known in the art and described herein.

### Formulated Delivery

[0558] The modified nucleic acid molecules or mmRNA of the present invention may be formulated, using the methods described herein. The formulations may contain modified nucleic acid molecules or mmRNA which may be modified and/or unmodified. The formulations may further include, but are not limited to, cell penetration agents, a pharmaceutically acceptable carrier, a delivery agent, a bioerodible or biocompatible polymer, a solvent, and a sustained-release delivery depot. The formulated modified nucleic acid molecules or mmRNA may be delivered to the cell using routes of administration known in the art and described herein.

[0559] The compositions may also be formulated for direct delivery to an organ or tissue in any of several ways in the art including, but not limited to, direct soaking or bathing, via a catheter, by gels, powder, ointments, creams, gels, lotions, and/or drops, by using substrates such as fabric or biodegradable materials coated or impregnated with the compositions, and the like.

### Administration

[0560] The modified nucleic acid molecules or mmRNA of the present invention may be administered by any route which results in a therapeutically effective outcome. These include, but are not limited to enteral, gastroenteral, epidural, oral, transdermal, epidural (peridural), intracerebral (into the cerebrum), intracerebroventricular (into the cerebral ventricles), epicutaneous (application onto the skin), intradermal, (into the skin itself), subcutaneous (under the skin), nasal administration (through the nose), intravenous (into a vein), intraarterial (into an artery), intramuscular (into a muscle), intracardiac (into the heart), intraosseous infusion (into the bone marrow), intrathecal (into the spinal canal), intraperitoneal, (infusion or injection into the peritoneum), intravesical infusion, intravitreal, (through the eye), intracavernous injection, (into the base of the penis), intravaginal administration, intrauterine, extra-amniotic administration, transdermal (diffusion through the intact skin for systemic distribution), transmucosal (diffusion through a mucous membrane), insufflation (snorting), sublingual, sublabial, enema, eye drops (onto the conjunctiva), or in ear drops. In specific embodiments, compositions may be administered in a way which allows them cross the blood-brain barrier, vascular barrier, or other epithelial barrier. Non-limiting routes of administration for the modified nucleic acids or mmRNA of the present invention are described below.

### Parenteral and Injectible Administration

[0561] Liquid dosage forms for parenteral administration include, but are not limited to, pharmaceutically acceptable emulsions, microemulsions, solutions, suspensions, syrups, and/or elixirs. In addition to active ingredients, liquid dosage forms may comprise inert diluents commonly used in the art such as, for example, water or other solvents, solubilizing agents and emulsifiers such as ethyl alcohol, isopropyl alcohol, ethyl carbonate, ethyl acetate, benzyl alcohol, benzyl benzoate, propylene glycol, 1,3-butylene glycol, dimethylformamide, oils (in particular, cottonseed, groundnut, corn, germ, olive, castor, and sesame oils), glycerol, tetrahydrofurfuryl alcohol, polyethylene glycols and fatty acid esters of sorbitan, and mixtures thereof. Besides inert diluents, oral compositions can include adjuvants such as wetting agents, emulsifying and suspending agents, sweetening, flavoring, and/or perfuming agents. In certain embodiments for parenteral administration, compositions are mixed with solubilizing agents such as CREMOPHOR®, alcohols, oils, modified oils, glycols, polysorbates, cyclodextrins, polymers, and/or combinations thereof

[0562] Injectable preparations, for example, sterile injectable aqueous or oleaginous suspensions may be formulated according to the known art using suitable dispersing agents, wetting agents, and/or suspending agents. Sterile injectable preparations may be sterile injectable solutions, suspensions, and/or emulsions in nontoxic parenterally acceptable diluents and/or solvents, for example, as a solution in 1,3-butanediol. Among the acceptable vehicles and solvents that may be employed are water, Ringer's solution, U.S.P., and isotonic sodium chloride solution. Sterile, fixed oils are conventionally employed as a solvent or suspending medium. For this purpose any bland fixed oil can be employed including synthetic mono- or diglycerides. Fatty acids such as oleic acid can be used in the preparation of injectables.

[0563] Injectable formulations can be sterilized, for example, by filtration through a bacterial-retaining filter, and/or by incorporating sterilizing agents in the form of sterile solid compositions which can be dissolved or dispersed in sterile water or other sterile injectable medium prior to use.

[0564] In order to prolong the effect of an active ingredient, it is often desirable to slow the absorption of the active ingredient from subcutaneous or intramuscular injection. This may be accomplished by the use of a liquid suspension of crystalline or amorphous material with poor water solubility. The rate of absorption of the drug then depends upon its rate of dissolution which, in turn, may depend upon crystal size and crystalline form. Alternatively, delayed absorption of a parenterally administered drug form is accomplished by dissolving or suspending the drug in an oil vehicle. Injectable depot forms are made by forming microencapsule matrices of the drug in biodegradable polymers such as polylactide-polyglycolide. Depending upon the ratio of drug to polymer and the nature of the particular polymer employed, the rate of drug release can be controlled. Examples of other biodegradable polymers include poly(orthoesters) and poly(anhydrides). Depot injectable formulations are prepared by entrapping the drug in liposomes or microemulsions which are compatible with body tissues.

### Rectal and Vaginal Administration

[0565] Compositions for rectal or vaginal administration are typically suppositories which can be prepared by mixing compositions with suitable non-irritating excipients such as cocoa butter, polyethylene glycol or a suppository wax which are solid at ambient temperature but liquid at body temperature and therefore melt in the rectum or vaginal cavity and release the active ingredient.

### Oral Administration

[0566] Liquid dosage forms for oral administration include, but are not limited to, pharmaceutically acceptable emulsions, microemulsions, solutions, suspensions, syrups, and/or elixirs. In addition to active ingredients, liquid dosage forms may comprise inert diluents commonly used in the art such as, for example, water or other solvents, solubilizing agents and emulsifiers such as ethyl alcohol, isopropyl alcohol, ethyl carbonate, ethyl acetate, benzyl alcohol, benzyl benzoate, propylene glycol, 1,3-butylene glycol, dimethylformamide, oils (in particular, cottonseed, groundnut, corn, germ, olive, castor, and sesame oils), glycerol, tetrahydrofurfuryl alcohol, polyethylene glycols and fatty acid esters of sorbitan, and mixtures thereof. Besides inert diluents, oral compositions can include adjuvants such as wetting agents, emulsifying and suspending agents, sweetening, flavoring, and/or perfuming agents. In certain embodiments for parenteral administration, compositions are mixed with solubilizing agents such as CREMOPHOR®, alcohols, oils, modified oils, glycols, polysorbates, cyclodextrins, polymers, and/or combinations thereof.

[0567] Solid dosage forms for oral administration include capsules, tablets, pills, powders, and granules. In such solid dosage forms, an active ingredient is mixed with at least one inert, pharmaceutically acceptable excipient such as sodium citrate or dicalcium phosphate and/or fillers or extenders (e.g. starches, lactose, sucrose, glucose, mannitol, and silicic acid), binders (e.g. carboxymethylcellulose, alginates, gelatin, polyvinylpyrrolidinone, sucrose, and acacia), humectants (e.g. glycerol), disintegrating agents (e.g. agar, calcium carbonate, potato or tapioca starch, alginic acid, certain silicates, and sodium carbonate), solution retarding agents (e.g. paraffin), absorption accelerators (e.g. quaternary ammonium compounds), wetting agents (e.g. cetyl alcohol and glycerol monostearate), absorbents (e.g. kaolin and bentonite clay), and lubricants (e.g. talc, calcium stearate, magnesium stearate, solid polyethylene glycols, sodium lauryl sulfate), and mixtures thereof. In the case of capsules, tablets and pills, the dosage form may comprise buffering agents.

### Topical or Transdermal Administration

[0568] As described herein, compositions containing the modified nucleic acid molecules or mmRNA of the invention may be formulated for administration topically. The skin may be an ideal target site for delivery as it is readily accessible. Gene expression may be restricted not only to the skin, potentially avoiding nonspecific toxicity, but also to specific layers and cell types within the skin.

[0569] The site of cutaneous expression of the delivered compositions will depend on the route of nucleic acid delivery. Three routes are commonly considered to deliver modified nucleic acid molecules or mmRNA to the skin: (i) topical application (e.g. for local/regional treatment); (ii) intradermal injection (e.g. for local/regional treatment); and (iii) systemic delivery (e.g. for treatment of dermatologic diseases that affect both cutaneous and extracutaneous regions). Modified nucleic acid molecules or mmRNA can be delivered to the skin by several different approaches known in the art. Most topical delivery approaches have been shown to work for delivery of DNA, such as but not limited to, topical application of non-cationic liposome—DNA complex, cationic liposome—DNA complex, particle-mediated (gene gun), puncture-mediated gene transfections, and viral delivery approaches. After delivery of the nucleic acid, gene products have been detected in a number of different skin cell types, including, but not limited to, basal keratinocytes, sebaceous gland cells, dermal fibroblasts and dermal macrophages.

[0570] In one embodiment, the invention provides for a variety of dressings (e.g., wound dressings) or bandages (e.g., adhesive bandages) for conveniently and/or effectively carrying out methods of the present invention. Typically dressing or bandages may comprise sufficient amounts of pharmaceutical compositions and/or modified nucleic acid molecules or mmRNA described herein to allow a user to perform multiple treatments of a subject(s).

[0571] In one embodiment, the invention provides for the modified nucleic acid molecules or mmRNA compositions to be delivered in more than one injection.

[0572] In one embodiment, before topical and/or transdermal administration at least one area of tissue, such as skin, may be subjected to a device and/or solution which may increase permeability. In one embodiment, the tissue may be subjected to an abrasion device to increase the permeability of the skin (see U.S. Patent Publication No. 20080275468, herein incorporated by reference in its entirety). In another embodiment, the tissue may be subjected to an ultrasound enhancement device. An ultrasound enhancement device may include, but is not limited to, the devices described in U.S. Publication No. 20040236268 and U.S. Pat. Nos. 6,491,657 and 6,234,990; each of which are herein incorporated by reference in their entireties. Methods of enhancing the permeability of tissue are described in U.S. Publication Nos. 20040171980 and 20040236268 and U.S. Pat. No. 6,190,315; each of which are herein incorporated by reference in their entireties.

[0573] In one embodiment, a device may be used to increase permeability of tissue before delivering formulations of modified mRNA described herein. The permeability of skin may be measured by methods known in the art and/or described in U.S. Pat. No. 6,190,315, herein incorporated by reference in its entirety. As a non-limiting example, a modified mRNA formulation may be delivered by the drug delivery methods described in U.S. Pat. No. 6,190,315, herein incorporated by reference in its entirety.

[0574] In another non-limiting example tissue may be treated with a eutectic mixture of local anesthetics (EMLA) cream before, during and/or after the tissue may be subjected to a device which may increase permeability. Katz et al. (Anesth Analg (2004); 98:371-76; herein incorporated by reference in its entirety) showed that using the EMLA cream in combination with a low energy, an onset of superficial cutaneous analgesia was seen as fast as 5 minutes after a pretreatment with a low energy ultrasound.

[0575] In one embodiment, enhancers may be applied to the tissue before, during, and/or after the tissue has been treated to increase permeability. Enhancers include, but are not limited to, transport enhancers, physical enhancers, and cavitation enhancers. Non-limiting examples of enhancers are described in U.S. Pat. No. 6,190,315, herein incorporated by reference in its entirety.

[0576] In one embodiment, a device may be used to increase permeability of tissue before delivering formulations of modified mRNA described herein, which may further contain a substance that invokes an immune response. In another non-limiting example, a formulation containing a substance to invoke an immune response may be delivered by the methods described in U.S. Publication Nos. 20040171980 and 20040236268; each of which are herein incorporated by reference in their entireties.

[0577] Dosage forms for topical and/or transdermal administration of a composition may include ointments, pastes, creams, lotions, gels, powders, solutions, sprays, inhalants and/or patches. Generally, an active ingredient is admixed under sterile conditions with a pharmaceutically acceptable excipient and/or any needed preservatives and/or buffers as may be required.

[0578] Additionally, the present invention contemplates the use of transdermal patches, which often have the added advantage of providing controlled delivery of a compound to the body. Such dosage forms may be prepared, for example, by dissolving and/or dispensing the compound in the proper medium. Alternatively or additionally, rate may be controlled by either providing a rate controlling membrane and/or by dispersing the compound in a polymer matrix and/or gel.

[0579] Formulations suitable for topical administration include, but are not limited to, liquid and/or semi liquid preparations such as liniments, lotions, oil in water and/or water in oil emulsions such as creams, ointments and/or pastes, and/or solutions and/or suspensions. Topically-administrable formulations may, for example, comprise from about 0.1% to about 10% (w/w) active ingredient, although the concentration of active ingredient may be as high as the solubility limit of the active ingredient in the solvent. Formulations for topical administration may further comprise one or more of the additional ingredients described herein.

### Depot Administration

[0580] As described herein, in some embodiments, the composition is formulated in depots for extended release. Generally, a specific organ or tissue (a “target tissue”) is targeted for administration.

[0581] In some aspects of the invention, the modified nucleic acid molecules or mmRNA are spatially retained within or proximal to a target tissue. Provided are method of providing a composition to a target tissue of a mammalian subject by contacting the target tissue (which contains one or more target cells) with the composition under conditions such that the composition, in particular the nucleic acid component(s) of the composition, is substantially retained in the target tissue, meaning that at least 10, 20, 30, 40, 50, 60, 70, 80, 85, 90, 95, 96, 97, 98, 99, 99.9, 99.99 or greater than 99.99% of the composition is retained in the target tissue. Advantageously, retention is determined by measuring the amount of the nucleic acid present in the composition that enters one or more target cells. For example, at least 1, 5, 10, 20, 30, 40, 50, 60, 70, 80, 85, 90, 95, 96, 97, 98, 99, 99.9, 99.99 or greater than 99.99% of the nucleic acids administered to the subject are present intracellularly at a period of time following administration. For example, intramuscular injection to a mammalian subject is performed using an aqueous composition containing a ribonucleic acid and a transfection reagent, and retention of the composition is determined by measuring the amount of the ribonucleic acid present in the muscle cells.

[0582] Aspects of the invention are directed to methods of providing a composition to a target tissue of a mammalian subject, by contacting the target tissue (containing one or more target cells) with the composition under conditions such that the composition is substantially retained in the target tissue. The composition contains an effective amount of a nucleic acid molecules or mmRNA such that the polypeptide of interest is produced in at least one target cell. The compositions generally contain a cell penetration agent, although “naked” nucleic acid (such as nucleic acids without a cell penetration agent or other agent) is also contemplated, and a pharmaceutically acceptable carrier. In certain embodiments, the formulations include a pharmaceutically acceptable carrier that causes the effective amount of nucleic acid molecules to be substantially retained in a target tissue containing the cell.

[0583] In some circumstances, the amount of a protein produced by cells in a tissue is desirably increased. Preferably, this increase in protein production is spatially restricted to cells within the target tissue. Thus, provided are methods of increasing production of a protein of interest in a tissue of a mammalian subject. A composition is provided that contains modified nucleic acid molecule or mmRNA characterized in that a unit quantity of composition has been determined to produce the polypeptide of interest in a substantial percentage of cells contained within a predetermined volume of the target tissue.

[0584] In another embodiment, compositions for generation of an in vivo depot containing a modified nucleic acid are provided. For example, the composition contains a bioerodible, biocompatible polymer, a solvent present in an amount effective to plasticize the polymer and form a gel therewith, and ribonucleic modified nucleic acid. In certain embodiments the composition also includes a cell penetration agent as described herein. In other embodiments, the composition also contains a thixotropic amount of a thixotropic agent mixable with the polymer so as to be effective to form a thixotropic composition. Further compositions include a stabilizing agent, a bulking agent, a chelating agent, or a buffering agent.

[0585] In other embodiments, provided are sustained-release delivery depots, such as for administration of a modified nucleic acid to an environment (meaning an organ or tissue site) in a patient. Such depots generally contain ribonucleic modified nucleic acid and a flexible chain polymer where both the modified nucleic acid and the flexible chain polymer are entrapped within a porous matrix of a crosslinked matrix protein. Usually, the pore size is less than 1 mm, such as 900 nm, 800 nm, 700 nm, 600 nm, 500 nm, 400 nm, 300 nm, 200 nm, 100 nm, or less than 100 nm. Usually the flexible chain polymer is hydrophilic. Usually the flexible chain polymer has a molecular weight of at least 50 kDa, such as 75 kDa, 100 kDa, 150 kDa, 200 kDa, 250 kDa, 300 kDa, 400 kDa, 500 kDa, or greater than 500 kDa. Usually the flexible chain polymer has a persistence length of less than 10%, such as 9, 8, 7, 6, 5, 4, 3, 2, 1 or less than 1% of the persistence length of the matrix protein. Usually the flexible chain polymer has a charge similar to that of the matrix protein. In some embodiments, the flexible chain polymer alters the effective pore size of a matrix of crosslinked matrix protein to a size capable of sustaining the diffusion of the engineered ribonucleic acid from the matrix into a surrounding tissue comprising a cell into which the modified nucleic acid is capable of entering.

[0586] In some embodiments, the composition includes a plurality of different modified nucleic acid molecules or mmRNA, where one or more than one of the modified nucleic acid molecules or mmRNA encodes a polypeptide of interest. Optionally, the composition also contains a cell penetration agent to assist in the intracellular delivery of the composition. A determination is made of the dose of the composition required to produce the polypeptide of interest in a substantial percentage of cells contained within the predetermined volume of the target tissue (generally, without inducing significant production of the polypeptide of interest in tissue adjacent to the predetermined volume, or distally to the target tissue). Subsequent to this determination, the determined dose is introduced directly into the tissue of the mammalian subject.

[0587] In one embodiment, the invention provides for the modified nucleic acid molecules or mmRNA to be delivered in more than one injection or by split dose injections.

[0588] In one embodiment, the invention may be retained near target tissue using a small disposable drug reservoir, patch pump or osmotic pump. Non-limiting examples of patch pumps include those manufactured and/or sold by BD®, (Franklin Lakes, N.J.), Insulet Corporation (Bedford, Mass.), SteadyMed Therapeutics (San Francisco, Calif.), Medtronic (Minneapolis, Minn.) (e.g., MiniMed), UniLife (York, Pa.), Valeritas (Bridgewater, N.J.), and SpringLeaf Therapeutics (Boston, Mass.). A non-limiting example of an osmotic pump include those manufactured by DURECT® (Cupertino, Calif.) (e.g., DUROS® and ALZET®).

### Pulmonary Administration

[0589] A pharmaceutical composition may be prepared, packaged, and/or sold in a formulation suitable for pulmonary administration via the buccal cavity. Such a formulation may comprise dry particles which comprise the active ingredient and which have a diameter in the range from about 0.5 nm to about 7 nm or from about 1 nm to about 6 nm. Such compositions are suitably in the form of dry powders for administration using a device comprising a dry powder reservoir to which a stream of propellant may be directed to disperse the powder and/or using a self propelling solvent/powder dispensing container such as a device comprising the active ingredient dissolved and/or suspended in a low-boiling propellant in a sealed container. Such powders comprise particles wherein at least 98% of the particles by weight have a diameter greater than 0.5 nm and at least 95% of the particles by number have a diameter less than 7 nm. Alternatively, at least 95% of the particles by weight have a diameter greater than 1 nm and at least 90% of the particles by number have a diameter less than 6 nm. Dry powder compositions may include a solid fine powder diluent such as sugar and are conveniently provided in a unit dose form.

[0590] Low boiling propellants generally include liquid propellants having a boiling point of below 65° F. at atmospheric pressure. Generally the propellant may constitute 50% to 99.9% (w/w) of the composition, and active ingredient may constitute 0.1% to 20% (w/w) of the composition. A propellant may further comprise additional ingredients such as a liquid non-ionic and/or solid anionic surfactant and/or a solid diluent (which may have a particle size of the same order as particles comprising the active ingredient).

[0591] As a non-limiting example, the modified nucleic acid molecules or mmRNA described herein may be formulated for pulmonary delivery by the methods described in U.S. Pat. No. 8,257,685; herein incorporated by reference in its entirety.

[0592] Pharmaceutical compositions formulated for pulmonary delivery may provide an active ingredient in the form of droplets of a solution and/or suspension. Such formulations may be prepared, packaged, and/or sold as aqueous and/or dilute alcoholic solutions and/or suspensions, optionally sterile, comprising active ingredient, and may conveniently be administered using any nebulization and/or atomization device. Such formulations may further comprise one or more additional ingredients including, but not limited to, a flavoring agent such as saccharin sodium, a volatile oil, a buffering agent, a surface active agent, and/or a preservative such as methylhydroxybenzoate. Droplets provided by this route of administration may have an average diameter in the range from about 0.1 nm to about 200 nm.

### Intranasal, Nasal and Buccal Administration

[0593] Formulations described herein as being useful for pulmonary delivery are useful for intranasal delivery of a pharmaceutical composition. Another formulation suitable for intranasal administration is a coarse powder comprising the active ingredient and having an average particle from about 0.2 μm to 500 μm. Such a formulation is administered in the manner in which snuff is taken, i.e. by rapid inhalation through the nasal passage from a container of the powder held close to the nose.

[0594] Formulations suitable for nasal administration may, for example, comprise from about as little as 0.1% (w/w) and as much as 100% (w/w) of active ingredient, and may comprise one or more of the additional ingredients described herein. A pharmaceutical composition may be prepared, packaged, and/or sold in a formulation suitable for buccal administration. Such formulations may, for example, be in the form of tablets and/or lozenges made using conventional methods, and may, for example, 0.1% to 20% (w/w) active ingredient, the balance comprising an orally dissolvable and/or degradable composition and, optionally, one or more of the additional ingredients described herein. Alternately, formulations suitable for buccal administration may comprise a powder and/or an aerosolized and/or atomized solution and/or suspension comprising active ingredient. Such powdered, aerosolized, and/or aerosolized formulations, when dispersed, may have an average particle and/or droplet size in the range from about 0.1 nm to about 200 nm, and may further comprise one or more of any additional ingredients described herein.

### Ophthalmic Administration

[0595] A pharmaceutical composition may be prepared, packaged, and/or sold in a formulation suitable for ophthalmic administration. Such formulations may, for example, be in the form of eye drops including, for example, a 0.1/1.0% (w/w) solution and/or suspension of the active ingredient in an aqueous or oily liquid excipient. Such drops may further comprise buffering agents, salts, and/or one or more other of any additional ingredients described herein. Other ophthalmically-administrable formulations which are useful include those which comprise the active ingredient in microcrystalline form and/or in a liposomal preparation. Ear drops and/or eye drops are contemplated as being within the scope of this invention. A multilayer thin film device may be prepared to contain a pharmaceutical composition for delivery to the eye and/or surrounding tissue.

### Payload Administration: Detectable Agents and Therapeutic Agents

[0596] The modified nucleic acid molecules or mmRNA described herein can be used in a number of different scenarios in which delivery of a substance (the “payload”) to a biological target is desired, for example delivery of detectable substances for detection of the target, or delivery of a therapeutic agent. Detection methods can include, but are not limited to, both imaging in vitro and in vivo imaging methods, e.g., immunohistochemistry, bioluminescence imaging (BLI), Magnetic Resonance Imaging (MRI), positron emission tomography (PET), electron microscopy, X-ray computed tomography, Raman imaging, optical coherence tomography, absorption imaging, thermal imaging, fluorescence reflectance imaging, fluorescence microscopy, fluorescence molecular tomographic imaging, nuclear magnetic resonance imaging, X-ray imaging, ultrasound imaging, photoacoustic imaging, lab assays, or in any situation where tagging/staining/imaging is required.

[0597] The modified nucleic acid molecules or mmRNA can be designed to include both a linker and a payload in any useful orientation. In one embodiment, the modified nucleic acid molecule can be covalently linked at any chemically appropriate position to a payload, e.g. detectable agent or therapeutic agent. For example, a linker having two ends is used to attach one end to the payload and the other end to the nucleobase, such as at the C-7 or C-8 positions of the deaza-adenosine or deaza-guanosine or to the N-3 or C-5 positions of cytosine or uracil. The polynucleotide of the invention can include more than one payload (e.g., a label and a transcription inhibitor), as well as a cleavable linker.

[0598] In one embodiment, the modified nucleotide is a modified 7-deaza-adenosine triphosphate, where one end of a cleavable linker is attached to the C7 position of 7-deaza-adenine, the other end of the linker is attached to an inhibitor (e.g., to the C5 position of the nucleobase on a cytidine), and a label (e.g., Cy5) is attached to the center of the linker (see, e.g., compound 1 of A*pCp C5 Parg Capless in FIG. 5 and columns 9 and 10 of U.S. Pat. No. 7,994,304, incorporated herein by reference). Upon incorporation of the modified 7-deaza-adenosine triphosphate to an encoding region, the resulting polynucleotide having a cleavable linker attached to a label and an inhibitor (e.g., a polymerase inhibitor). Upon cleavage of the linker (e.g., with reductive conditions to reduce a linker having a cleavable disulfide moiety), the label and inhibitor are released. Additional linkers and payloads (e.g., therapeutic agents, detectable labels, and cell penetrating payloads) are described herein.

[0599] Scheme 12, below, depicts a modified nucleotide wherein the nucleobase, adenine, is attached to a linker at the C-7 carbon of 7-deaza adenine. In addition, Scheme 12 depicts the modified nucleotide with the linker and payload, e.g., a detectable agent, incorporated onto the 3′ end of the mRNA. Disulfide cleavage and a 1,2-addition of the thiol group onto the propargyl ester releases the detectable agent. The remaining structure (depicted, for example, as pApC5Parg in Scheme 12) is the inhibitor. The structure of the modified nucleotide is important as the tethered inhibitor sterically interferes with the ability of the polymerase to incorporate a second base. Thus, it is critical that the tether be long enough to affect the incorporation of a second base and that the inhibitor be in a stereochemical orientation to inhibits or prohibits second and follow on nucleotides into the growing polynucleotide strand.

[chemical structure]

[chemical structure]

[0600] For example, the modified nucleic acid molecules or mmRNA described herein can be used in reprogramming induced pluripotent stem cells (iPS cells), which can directly track cells that are transfected compared to total cells in the cluster. In another example, a drug that may be attached to the modified nucleic acid molecules or mmRNA via a linker and may be fluorescently labeled can be used to track the drug in vivo, e.g. intracellularly. Other examples include, but are not limited to, the use of modified nucleic acid molecules or mmRNA in reversible drug delivery into cells.

[0601] The modified nucleic acid molecules or mmRNA described herein can be used in intracellular targeting of a payload, e.g., detectable or therapeutic agent, to specific organelle. Exemplary intracellular targets can include, but are not limited to, the nuclear localization for advanced mRNA processing, or a nuclear localization sequence (NLS) linked to the mRNA containing an inhibitor.

[0602] In addition, the modified nucleic acid molecules or mmRNA described herein can be used to deliver therapeutic agents to cells or tissues, e.g., in living animals. For example, the modified nucleic acids or mmRNA described herein can be used to deliver highly polar chemotherapeutics agents to kill cancer cells. The modified nucleic acid molecules or mmRNA attached to the therapeutic agent through a linker can facilitate member permeation allowing the therapeutic agent to travel into a cell to reach an intracellular target.

[0603] In one example, the linker is attached at the 2′-position of the ribose ring and/or at the 3′ and/or 5′ position of the modified nucleic acid molecule or mmRNA (See e.g., International Pub. No. WO2012030683, herein incorporated by reference in its entirety). The linker may be any linker disclosed herein, known in the art and/or disclosed in International Pub. No. WO2012030683, herein incorporated by reference in its entirety.

[0604] In another example, the modified nucleic acid molecules or mmRNA can be attached to the modified nucleic acid molecules or mmRNA a viral inhibitory peptide (VIP) through a cleavable linker. The cleavable linker can release the VIP and dye into the cell. In another example, the modified nucleic acid molecules or mmRNA can be attached through the linker to an ADP-ribosylate, which is responsible for the actions of some bacterial toxins, such as cholera toxin, diphtheria toxin, and pertussis toxin. These toxin proteins are ADP-ribosyltransferases that modify target proteins in human cells. For example, cholera toxin ADP-ribosylates G proteins modifies human cells by causing massive fluid secretion from the lining of the small intestine, which results in life-threatening diarrhea.

[0605] In some embodiments the payload may be a therapeutic agent such as a cytotoxin, radioactive ion, chemotherapeutic, or other therapeutic agent. A cytotoxin or cytotoxic agent includes any agent that may be detrimental to cells. Examples include, but are not limited to, taxol, cytochalasin B, gramicidin D, ethidium bromide, emetine, mitomycin, etoposide, tenoposide, vincristine, vinblastine, colchicin, doxorubicin, daunorubicin, dihydroxy anthracin dione, mitoxantrone, mithramycin, actinomycin D, 1-dehydrotestosterone, glucocorticoids, procaine, tetracaine, lidocaine, propranolol, puromycin, maytansinoids, e.g., maytansinol (see U.S. Pat. No. 5,208,020 incorporated herein in its entirety), CC-1065 (see U.S. Pat. Nos. 5,475,092, 5,585,499, 5,846,545; all of which are incorporated herein by reference) and analogs or homologs thereof. Radioactive ions include, but are not limited to iodine (e.g., iodine 125 or iodine 131), strontium 89, phosphorous, palladium, cesium, iridium, phosphate, cobalt, yttrium 90, Samarium 153 and praseodymium. Other therapeutic agents include, but are not limited to, antimetabolites (e.g., methotrexate, 6-mercaptopurine, 6-thioguanine, cytarabine, 5-fluorouracil decarbazine), alkylating agents (e.g., mechlorethamine, thioepa chlorambucil, CC-1065, melphalan, carmustine (BSNU) and lomustine (CCNU), cyclothosphamide, busulfan, dibromomannitol, streptozotocin, mitomycin C, and cis-dichlorodiamine platinum (II) (DDP) cisplatin), anthracyclines (e.g., daunorubicin (formerly daunomycin) and doxorubicin), antibiotics (e.g., dactinomycin (formerly actinomycin), bleomycin, mithramycin, and anthramycin (AMC)), and anti-mitotic agents (e.g., vincristine, vinblastine, taxol and maytansinoids).

[0606] In some embodiments, the payload may be a detectable agent, such as, but not limited to, various organic small molecules, inorganic compounds, nanoparticles, enzymes or enzyme substrates, fluorescent materials, luminescent materials (e.g., luminol), bioluminescent materials (e.g., luciferase, luciferin, and aequorin), chemiluminescent materials, radioactive materials (e.g., ¹⁸F, ⁶⁷Ga, ^{81m}Kr, ⁸²Rb, ¹¹¹In, ¹²³I, ¹³³Xe, ²⁰¹Tl, ¹²⁵I, ³⁵S, ¹⁴C, ³H, or ^{99m}Tc (e.g., as pertechnetate (technetate(VII), TcO₄⁻)), and contrast agents (e.g., gold (e.g., gold nanoparticles), gadolinium (e.g., chelated Gd), iron oxides (e.g., superparamagnetic iron oxide (SPIO), monocrystalline iron oxide nanoparticles (MIONs), and ultrasmall superparamagnetic iron oxide (USPIO)), manganese chelates (e.g., Mn-DPDP), barium sulfate, iodinated contrast media (iohexol), microbubbles, or perfluorocarbons). Such optically-detectable labels include for example, without limitation, 4-acetamido-4′-isothiocyanatostilbene-2,2′disulfonic acid; acridine and derivatives (e.g., acridine and acridine isothiocyanate); 5-(2′-aminoethyl)aminonaphthalene-1-sulfonic acid (EDANS); 4-amino-N-[3-vinylsulfonyl)phenyl]naphthalimide-3,5 disulfonate; N-(4-anilino-1-naphthyl)maleimide; anthranilamide; BODIPY; Brilliant Yellow; coumarin and derivatives (e.g., coumarin, 7-amino-4-methylcoumarin (AMC, Coumarin 120), and 7-amino-4-trifluoromethylcoumarin (Coumarin 151)); cyanine dyes; cyanosine; 4′,6-diaminidino-2-phenylindole (DAPI); 5′ 5″-dibromopyrogallol-sulfonaphthalein (Bromopyrogallol Red); 7-diethylamino-3-(4′-isothiocyanatophenyl)-4-methylcoumarin; diethylenetriamine pentaacetate; 4,4′-diisothiocyanatodihydro-stilbene-2,2′-disulfonic acid; 4,4′-diisothiocyanatostilbene-2,2′-disulfonic acid; 5-[dimethylamino]-naphthalene-1-sulfonyl chloride (DNS, dansylchloride); 4-dimethylaminophenylazophenyl-4′-isothiocyanate (DABITC); eosin and derivatives (e.g., eosin and eosin isothiocyanate); erythrosin and derivatives (e.g., erythrosin B and erythrosin isothiocyanate); ethidium; fluorescein and derivatives (e.g., 5-carboxyfluorescein (FAM), 5-(4,6-dichlorotriazin-2-yl)aminofluorescein (DTAF), 2′,7′-dimethoxy-4′5′-dichloro-6-carboxyfluorescein, fluorescein, fluorescein isothiocyanate, X-rhodamine-5-(and-6)-isothiocyanate (QFITC or XRITC), and fluorescamine); 2-[2-[3-[[1,3-dihydro-1,1-dimethyl-3-(3-sulfopropyl)-2H-benz[e]indol-2-ylidene]ethylidene]-2-[4-(ethoxycarbonyl)-1-piperazinyl]-1-cyclopenten-1-yl]ethenyl]-1,1-dimethyl-3-(3-sulforpropyl)-1H-benz[e]indolium hydroxide, inner salt, compound with n,n-diethylethanamine (1:1) (IR144); 5-chloro-2-[2-[3-[(5-chloro-3-ethyl-2(3H)-benzothiazol-ylidene)ethylidene]-2-(diphenylamino)-1-cyclopenten-1-yl]ethenyl]-3-ethyl benzothiazolium perchlorate (IR140); Malachite Green isothiocyanate; 4-methylumbelliferone orthocresolphthalein; nitrotyrosine; pararosaniline; Phenol Red; B-phycoerythrin; o-phthaldialdehyde; pyrene and derivatives (e.g., pyrene, pyrene butyrate, and succinimidyl 1-pyrene); butyrate quantum dots; Reactive Red 4 (Cibacron™ Brilliant Red 3B-A); rhodamine and derivatives (e.g., 6-carboxy-X-rhodamine (ROX), 6-carboxyrhodamine (R6G), lissamine rhodamine B sulfonyl chloride rhodarnine (Rhod), rhodamine B, rhodamine 123, rhodamine X isothiocyanate, sulforhodamine B, sulforhodamine 101, sulfonyl chloride derivative of sulforhodamine 101 (Texas Red), N,N,N′,N′tetramethyl-6-carboxyrhodamine (TAMRA) tetramethyl rhodamine, and tetramethyl rhodamine isothiocyanate (TRITC)); riboflavin; rosolic acid; terbium chelate derivatives; Cyanine-3 (Cy3); Cyanine-5 (Cy5); cyanine-5.5 (Cy5.5), Cyanine-7 (Cy7); IRD 700; IRD 800; Alexa 647; La Jolta Blue; phthalo cyanine; and naphthalo cyanine. In some embodiments, the detectable label may be a fluorescent dye, such as Cy5 and Cy3.

[0607] In some embodiments, the detectable agent may be a non-detectable pre-cursor that becomes detectable upon activation (e.g., fluorogenic tetrazine-fluorophore constructs (e.g., tetrazine-BODIPY FL, tetrazine-Oregon Green 488, or tetrazine-BODIPY TMR-X) or enzyme activatable fluorogenic agents (e.g., PROSENSE® (VisEn Medical))). In vitro assays in which the enzyme labeled compositions can be used include, but are not limited to, enzyme linked immunosorbent assays (ELISAs), immunoprecipitation assays, immunofluorescence, enzyme immunoassays (EIA), radioimmunoassays (RIA), and Western blot analysis.

[0608] When the compounds are enzymatically labeled with, for example, horseradish peroxidase, alkaline phosphatase, or luciferase, the enzymatic label may be detected by the determination of the conversion of an appropriate substrate to a product.

[0609] Labels, other than those described herein, are contemplated by the present disclosure, including, but not limited to, other optically-detectable labels. Labels can be attached to the modified nucleotide of the present disclosure at any position using standard chemistries such that the label can be removed from the incorporated base upon cleavage of the cleavable linker

### Combinations

[0610] The nucleic acid molecules or mmRNA may be used in combination with one or more other therapeutic, prophylactic, diagnostic, or imaging agents. By “in combination with,” it is not intended to imply that the agents must be administered at the same time and/or formulated for delivery together, although these methods of delivery are within the scope of the present disclosure. Compositions can be administered concurrently with, prior to, or subsequent to, one or more other desired therapeutics or medical procedures. In general, each agent will be administered at a dose and/or on a time schedule determined for that agent. In some embodiments, the present disclosure encompasses the delivery of pharmaceutical, prophylactic, diagnostic, or imaging compositions in combination with agents that may improve their bioavailability, reduce and/or modify their metabolism, inhibit their excretion, and/or modify their distribution within the body. As a non-limiting example, the nucleic acid molecules or mmRNA may be used in combination with a pharmaceutical agent for the treatment of cancer or to control hyperproliferative cells. In U.S. Pat. No. 7,964,571, herein incorporated by reference in its entirety, a combination therapy for the treatment of solid primary or metastasized tumor is described using a pharmaceutical composition including a DNA plasmid encoding for interleukin-12 with a lipopolymer and also administering at least one anticancer agent or chemotherapeutic. Further, the nucleic acid molecules and mmRNA of the present invention that encodes anti-proliferative molecules may be in a pharmaceutical composition with a lipopolymer (see e.g., U.S. Pub. No. 20110218231, herein incorporated by reference in its entirety, claiming a pharmaceutical composition comprising a DNA plasmid encoding an anti-proliferative molecule and a lipopolymer) which may be administered with at least one chemotherapeutic or anticancer agent.

### Cell Penetrating Payloads

[0611] In some embodiments, the modified nucleotides and modified nucleic acid molecules, which are incorporated into a nucleic acid, e.g., RNA or mRNA, can also include a payload that can be a cell penetrating moiety or agent that enhances intracellular delivery of the compositions. For example, the compositions can include, but are not limited to, a cell-penetrating peptide sequence that facilitates delivery to the intracellular space, e.g., HIV-derived TAT peptide, penetratins, transportans, or hCT derived cell-penetrating peptides, see, e.g., Caron et al., (2001) Mol Ther. 3(3):310-8; Langel, Cell-Penetrating Peptides: Processes and Applications (CRC Press, Boca Raton Fla. 2002); El-Andaloussi et al., (2005) Curr Pharm Des. 11(28):3597-611; and Deshayes et al., (2005) Cell Mol Life Sci. 62(16):1839-49; all of which are incorporated herein by reference. The compositions can also be formulated to include a cell penetrating agent, e.g., liposomes, which enhance delivery of the compositions to the intracellular space.

### Biological Targets

[0612] The modified nucleotides and modified nucleic acid molecules described herein, which are incorporated into a nucleic acid, e.g., RNA or mRNA, can be used to deliver a payload to any biological target for which a specific ligand exists or can be generated. The ligand can bind to the biological target either covalently or non-covalently.

[0613] Examples of biological targets include, but are not limited to, biopolymers, e.g., antibodies, nucleic acids such as RNA and DNA, proteins, enzymes; examples of proteins include, but are not limited to, enzymes, receptors, and ion channels. In some embodiments the target may be a tissue- or a cell-type specific marker, e.g., a protein that is expressed specifically on a selected tissue or cell type. In some embodiments, the target may be a receptor, such as, but not limited to, plasma membrane receptors and nuclear receptors; more specific examples include, but are not limited to, G-protein-coupled receptors, cell pore proteins, transporter proteins, surface-expressed antibodies, HLA proteins, MHC proteins and growth factor receptors.

### Dosing

[0614] The present invention provides methods comprising administering modified mRNAs and their encoded proteins or complexes in accordance with the invention to a subject in need thereof. Nucleic acids, proteins or complexes, or pharmaceutical, imaging, diagnostic, or prophylactic compositions thereof, may be administered to a subject using any amount and any route of administration effective for preventing, treating, diagnosing, or imaging a disease, disorder, and/or condition (e.g., a disease, disorder, and/or condition relating to working memory deficits). The exact amount required will vary from subject to subject, depending on the species, age, and general condition of the subject, the severity of the disease, the particular composition, its mode of administration, its mode of activity, and the like. Compositions in accordance with the invention are typically formulated in dosage unit form for ease of administration and uniformity of dosage. It will be understood, however, that the total daily usage of the compositions of the present invention may be decided by the attending physician within the scope of sound medical judgment. The specific therapeutically effective, prophylactically effective, or appropriate imaging dose level for any particular patient will depend upon a variety of factors including the disorder being treated and the severity of the disorder; the activity of the specific compound employed; the specific composition employed; the age, body weight, general health, sex and diet of the patient; the time of administration, route of administration, and rate of excretion of the specific compound employed; the duration of the treatment; drugs used in combination or coincidental with the specific compound employed; and like factors well known in the medical arts.

[0615] In certain embodiments, compositions in accordance with the present invention may be administered at dosage levels sufficient to deliver from about 0.0001 mg/kg to about 100 mg/kg, from about 0.001 mg/kg to about 0.05 mg/kg, from about 0.005 mg/kg to about 0.05 mg/kg, from about 0.001 mg/kg to about 0.005 mg/kg, from about 0.05 mg/kg to about 0.5 mg/kg, from about 0.01 mg/kg to about 50 mg/kg, from about 0.1 mg/kg to about 40 mg/kg, from about 0.5 mg/kg to about 30 mg/kg, from about 0.01 mg/kg to about 10 mg/kg, from about 0.1 mg/kg to about 10 mg/kg, or from about 1 mg/kg to about 25 mg/kg, of subject body weight per day, one or more times a day, to obtain the desired therapeutic, diagnostic, prophylactic, or imaging effect. The desired dosage may be delivered three times a day, two times a day, once a day, every other day, every third day, every week, every two weeks, every three weeks, or every four weeks. In certain embodiments, the desired dosage may be delivered using multiple administrations (e.g., two, three, four, five, six, seven, eight, nine, ten, eleven, twelve, thirteen, fourteen, or more administrations).

[0616] According to the present invention, it has been discovered that administration of mmRNA in split-dose regimens produce higher levels of proteins in mammalian subjects. As used herein, a “split dose” is the division of single unit dose or total daily dose into two or more doses, e.g, two or more administrations of the single unit dose. As used herein, a “single unit dose” is a dose of any therapeutic administered in one dose/at one time/single route/single point of contact, i.e., single administration event. As used herein, a “total daily dose” is an amount given or prescribed in 24 hr period. It may be administered as a single unit dose. In one embodiment, the mmRNA of the present invention are administered to a subject in split doses. The mmRNA may be formulated in buffer only or in a formulation described herein.

### Dosage Forms

[0617] A pharmaceutical composition described herein can be formulated into a dosage form described herein, such as a topical, intranasal, intratracheal, or injectable (e.g., intravenous, intraocular, intravitreal, intramuscular, intracardiac, intraperitoneal, subcutaneous).

### Liquid Dosage Forms

[0618] Liquid dosage forms for parenteral administration include, but are not limited to, pharmaceutically acceptable emulsions, microemulsions, solutions, suspensions, syrups, and/or elixirs. In addition to active ingredients, liquid dosage forms may comprise inert diluents commonly used in the art including, but not limited to, water or other solvents, solubilizing agents and emulsifiers such as ethyl alcohol, isopropyl alcohol, ethyl carbonate, ethyl acetate, benzyl alcohol, benzyl benzoate, propylene glycol, 1,3-butylene glycol, dimethylformamide, oils (in particular, cottonseed, groundnut, corn, germ, olive, castor, and sesame oils), glycerol, tetrahydrofurfuryl alcohol, polyethylene glycols and fatty acid esters of sorbitan, and mixtures thereof. In certain embodiments for parenteral administration, compositions may be mixed with solubilizing agents such as CREMOPHOR®, alcohols, oils, modified oils, glycols, polysorbates, cyclodextrins, polymers, and/or combinations thereof.

### Injectable

[0619] Injectable preparations, for example, sterile injectable aqueous or oleaginous suspensions may be formulated according to the known art and may include suitable dispersing agents, wetting agents, and/or suspending agents. Sterile injectable preparations may be sterile injectable solutions, suspensions, and/or emulsions in nontoxic parenterally acceptable diluents and/or solvents, for example, a solution in 1,3-butanediol. Among the acceptable vehicles and solvents that may be employed include, but are not limited to, water, Ringer's solution, U.S.P., and isotonic sodium chloride solution. Sterile, fixed oils are conventionally employed as a solvent or suspending medium. For this purpose any bland fixed oil can be employed including synthetic mono- or diglycerides. Fatty acids such as oleic acid can be used in the preparation of injectables.

[0620] Injectable formulations can be sterilized, for example, by filtration through a bacterial-retaining filter, and/or by incorporating sterilizing agents in the form of sterile solid compositions which can be dissolved or dispersed in sterile water or other sterile injectable medium prior to use.

[0621] In order to prolong the effect of an active ingredient, it may be desirable to slow the absorption of the active ingredient from subcutaneous or intramuscular injection. This may be accomplished by the use of a liquid suspension of crystalline or amorphous material with poor water solubility. The rate of absorption of modified mRNA then depends upon its rate of dissolution which, in turn, may depend upon crystal size and crystalline form. Alternatively, delayed absorption of a parenterally administered modified mRNA may be accomplished by dissolving or suspending the modified mRNA in an oil vehicle. Injectable depot forms are made by forming microencapsule matrices of the modified mRNA in biodegradable polymers such as polylactide-polyglycolide. Depending upon the ratio of modified mRNA to polymer and the nature of the particular polymer employed, the rate of modified mRNA release can be controlled. Examples of other biodegradable polymers include, but are not limited to, poly(orthoesters) and poly(anhydrides). Depot injectable formulations may be prepared by entrapping the modified mRNA in liposomes or microemulsions which are compatible with body tissues.

### Pulmonary

[0622] Formulations described herein as being useful for pulmonary delivery may also be used for intranasal delivery of a pharmaceutical composition. Another formulation suitable for intranasal administration may be a coarse powder comprising the active ingredient and having an average particle from about 0.2 μm to 500 μm. Such a formulation may be administered in the manner in which snuff is taken, i.e. by rapid inhalation through the nasal passage from a container of the powder held close to the nose.

[0623] Formulations suitable for nasal administration may, for example, comprise from about as little as 0.1% (w/w) and as much as 100% (w/w) of active ingredient, and may comprise one or more of the additional ingredients described herein. A pharmaceutical composition may be prepared, packaged, and/or sold in a formulation suitable for buccal administration. Such formulations may, for example, be in the form of tablets and/or lozenges made using conventional methods, and may, for example, contain about 0.1% to 20% (w/w) active ingredient, where the balance may comprise an orally dissolvable and/or degradable composition and, optionally, one or more of the additional ingredients described herein. Alternately, formulations suitable for buccal administration may comprise a powder and/or an aerosolized and/or atomized solution and/or suspension comprising active ingredient. Such powdered, aerosolized, and/or aerosolized formulations, when dispersed, may have an average particle and/or droplet size in the range from about 0.1 nm to about 200 nm, and may further comprise one or more of any additional ingredients described herein.

[0624] General considerations in the formulation and/or manufacture of pharmaceutical agents may be found, for example, in Remington: The Science and Practice of Pharmacy 21^{st} ed., Lippincott Williams & Wilkins, 2005 (incorporated herein by reference in its entirety).

### Coatings or Shells

[0625] Solid dosage forms of tablets, dragees, capsules, pills, and granules can be prepared with coatings and shells such as enteric coatings and other coatings well known in the pharmaceutical formulating art. They may optionally comprise opacifying agents and can be of a composition that they release the active ingredient(s) only, or preferentially, in a certain part of the intestinal tract, optionally, in a delayed manner. Examples of embedding compositions which can be used include polymeric substances and waxes. Solid compositions of a similar type may be employed as fillers in soft and hard-filled gelatin capsules using such excipients as lactose or milk sugar as well as high molecular weight polyethylene glycols and the like.

### Properties of the Pharmaceutical Compositions

[0626] The pharmaceutical compositions described herein can be characterized by one or more of the following properties:

### Bioavailability

[0627] The modified nucleic acid molecules, when formulated into a composition with a delivery agent as described herein, can exhibit an increase in bioavailability as compared to a composition lacking a delivery agent as described herein. As used herein, the term “bioavailability” refers to the systemic availability of a given amount of a modified nucleic acid molecule administered to a mammal. Bioavailability can be assessed by measuring the area under the curve (AUC) or the maximum serum or plasma concentration (Cₘₐₓ) of the unchanged form of a compound following administration of the compound to a mammal. AUC is a determination of the area under the curve plotting the serum or plasma concentration of a compound along the ordinate (Y-axis) against time along the abscissa (X-axis). Generally, the AUC for a particular compound can be calculated using methods known to those of ordinary skill in the art and as described in G. S. Banker, Modern Pharmaceutics, Drugs and the Pharmaceutical Sciences, v. 72, Marcel Dekker, New York, Inc., 1996, herein incorporated by reference.

[0628] The Cₘₐₓ value is the maximum concentration of the compound achieved in the serum or plasma of a mammal following administration of the compound to the mammal. The Cₘₐₓ value of a particular compound can be measured using methods known to those of ordinary skill in the art. The phrases “increasing bioavailability” or “improving the pharmacokinetics,” as used herein mean that the systemic availability of a first modified nucleic acid molecule, measured as AUC, Cₘₐₓ, or Cₘᵢₙ in a mammal is greater, when co-administered with a delivery agent as described herein, than when such co-administration does not take place. In some embodiments, the bioavailability of the modified nucleic acid molecule can increase by at least about 2%, at least about 5%, at least about 10%, at least about 15%, at least about 20%, at least about 25%, at least about 30%, at least about 35%, at least about 40%, at least about 45%, at least about 50%, at least about 55%, at least about 60%, at least about 65%, at least about 70%, at least about 75%, at least about 80%, at least about 85%, at least about 90%, at least about 95%, or about 100%.

### Therapeutic Window

[0629] The modified nucleic acid molecules, when formulated into a composition with a delivery agent as described herein, can exhibit an increase in the therapeutic window of the administered modified nucleic acid molecule composition as compared to the therapeutic window of the administered modified nucleic acid molecule composition lacking a delivery agent as described herein. As used herein “therapeutic window” refers to the range of plasma concentrations, or the range of levels of therapeutically active substance at the site of action, with a high probability of eliciting a therapeutic effect. In some embodiments, the therapeutic window of the modified nucleic acid molecule when co-administered with a delivery agent as described herein can increase by at least about 2%, at least about 5%, at least about 10%, at least about 15%, at least about 20%, at least about 25%, at least about 30%, at least about 35%, at least about 40%, at least about 45%, at least about 50%, at least about 55%, at least about 60%, at least about 65%, at least about 70%, at least about 75%, at least about 80%, at least about 85%, at least about 90%, at least about 95%, or about 100%.

### Volume of Distribution

[0630] The modified nucleic acid molecules, when formulated into a composition with a delivery agent as described herein, can exhibit an improved volume of distribution (V_{dist}), e.g., reduced or targeted, relative to a modified nucleic acid molecule composition lacking a delivery agent as described herein. The volume of distribution (V_{dist}) relates the amount of the drug in the body to the concentration of the drug in the blood or plasma. As used herein, the term “volume of distribution” refers to the fluid volume that would be required to contain the total amount of the drug in the body at the same concentration as in the blood or plasma: V_{dist} equals the amount of drug in the body/concentration of drug in blood or plasma. For example, for a 10 mg dose and a plasma concentration of 10 mg/L, the volume of distribution would be 1 liter. The volume of distribution reflects the extent to which the drug is present in the extravascular tissue. A large volume of distribution reflects the tendency of a compound to bind to the tissue components compared with plasma protein binding. In a clinical setting, V_{dist} can be used to determine a loading dose to achieve a steady state concentration. In some embodiments, the volume of distribution of the modified nucleic acid molecule when co-administered with a delivery agent as described herein can decrease at least about 2%, at least about 5%, at least about 10%, at least about 15%, at least about 20%, at least about 25%, at least about 30%, at least about 35%, at least about 40%, at least about 45%, at least about 50%, at least about 55%, at least about 60%, at least about 65%, at least about 70%.

### Biological Effect

[0631] In one embodiment, the biological effect of the modified mRNA delivered to the animals may be categorized by analyzing the protein expression in the animals. The protein expression may be determined from analyzing a biological sample collected from a mammal administered the modified mRNA of the present invention. In one embodiment, the expression protein encoded by the modified mRNA administered to the mammal of at least 50 pg/ml may be preferred. For example, a protein expression of 50-200 pg/ml for the protein encoded by the modified mRNA delivered to the mammal may be seen as a therapeutically effective amount of protein in the mammal.

### Detection of Modified Nucleic Acids by Mass Spectrometry

[0632] Mass spectrometry (MS) is an analytical technique that can provide structural and molecular mass/concentration information on molecules after their conversion to ions. The molecules are first ionized to acquire positive or negative charges and then they travel through the mass analyzer to arrive at different areas of the detector according to their mass/charge (m/z) ratio.

[0633] Mass spectrometry is performed using a mass spectrometer which includes an ion source for ionizing the fractionated sample and creating charged molecules for further analysis. For example ionization of the sample may be performed by electrospray ionization (ESI), atmospheric pressure chemical ionization (APCI), photoionization, electron ionization, fast atom bombardment (FAB)/liquid secondary ionization (LSIMS), matrix assisted laser desorption/ionization (MALDI), field ionization, field desorption, thermospray/plasmaspray ionization, and particle beam ionization. The skilled artisan will understand that the choice of ionization method can be determined based on the analyte to be measured, type of sample, the type of detector, the choice of positive versus negative mode, etc.

[0634] After the sample has been ionized, the positively charged or negatively charged ions thereby created may be analyzed to determine a mass-to-charge ratio (i.e., m/z). Suitable analyzers for determining mass-to-charge ratios include quadropole analyzers, ion traps analyzers, and time-of-flight analyzers. The ions may be detected using several detection modes. For example, selected ions may be detected (i.e., using a selective ion monitoring mode (SIM)), or alternatively, ions may be detected using a scanning mode, e.g., multiple reaction monitoring (MRM) or selected reaction monitoring (SRM).

[0635] Liquid chromatography-multiple reaction monitoring (LC-MS/MRM) coupled with stable isotope labeled dilution of peptide standards has been shown to be an effective method for protein verification (e.g., Keshishian et al., Mol Cell Proteomics 2009 8: 2339-2349; Kuhn et al., Clin Chem 2009 55:1108-1117; Lopez et al., Clin Chem 2010 56:281-290; each of which are herein incorporated by reference in its entirety). Unlike untargeted mass spectrometry frequently used in biomarker discovery studies, targeted MS methods are peptide sequence—based modes of MS that focus the full analytical capacity of the instrument on tens to hundreds of selected peptides in a complex mixture. By restricting detection and fragmentation to only those peptides derived from proteins of interest, sensitivity and reproducibility are improved dramatically compared to discovery-mode MS methods. This method of mass spectrometry-based multiple reaction monitoring (MRM) quantitation of proteins can dramatically impact the discovery and quantitation of biomarkers via rapid, targeted, multiplexed protein expression profiling of clinical samples.

[0636] In one embodiment, a biological sample which may contain at least one protein encoded by at least one modified mRNA of the present invention may be analyzed by the method of MRM-MS. The quantification of the biological sample may further include, but is not limited to, isotopically labeled peptides or proteins as internal standards.

[0637] According to the present invention, the biological sample, once obtained from the subject, may be subjected to enzyme digestion. As used herein, the term “digest” means to break apart into shorter peptides. As used herein, the phrase “treating a sample to digest proteins” means manipulating a sample in such a way as to break down proteins in a sample. These enzymes include, but are not limited to, trypsin, endoproteinase Glu-C and chymotrypsin. In one embodiment, a biological sample which may contain at least one protein encoded by at least one modified mRNA of the present invention may be digested using enzymes.

[0638] In one embodiment, a biological sample which may contain protein encoded by modified mRNA of the present invention may be analyzed for protein using electrospray ionization. Electrospray ionization (ESI) mass spectrometry (ESIMS) uses electrical energy to aid in the transfer of ions from the solution to the gaseous phase before they are analyzed by mass spectrometry. Samples may be analyzed using methods known in the art (e.g., Ho et al., Clin Biochem Rev. 2003 24(1):3-12; herein incorporated by reference in its entirety). The ionic species contained in solution may be transferred into the gas phase by dispersing a fine spray of charge droplets, evaporating the solvent and ejecting the ions from the charged droplets to generate a mist of highly charged droplets. The mist of highly charged droplets may be analyzed using at least 1, at least 2, at least 3 or at least 4 mass analyzers such as, but not limited to, a quadropole mass analyzer. Further, the mass spectrometry method may include a purification step. As a non-limiting example, the first quadrapole may be set to select a single m/z ratio so it may filter out other molecular ions having a different m/z ratio which may eliminate complicated and time-consuming sample purification procedures prior to MS analysis.

[0639] In one embodiment, a biological sample which may contain protein encoded by modified mRNA of the present invention may be analyzed for protein in a tandem ESIMS system (e.g., MS/MS). As non-limiting examples, the droplets may be analyzed using a product scan (or daughter scan) a precursor scan (parent scan) a neutral loss or a multiple reaction monitoring.

[0640] In one embodiment, a biological sample which may contain protein encoded by modified mRNA of the present invention may be analyzed using matrix-assisted laser desorption/ionization (MALDI) mass spectrometry (MALDIMS). MALDI provides for the nondestructive vaporization and ionization of both large and small molecules, such as proteins. In MALDI analysis, the analyte is first co-crystallized with a large molar excess of a matrix compound, which may also include, but is not limited to, an ultraviolet absorbing weak organic acid. Non-limiting examples of matrices used in MALDI are α-cyano-4-hydroxycinnamic acid, 3,5-dimethoxy-4-hydroxycinnamic acid and 2,5-dihydroxybenzoic acid. Laser radiation of the analyte-matrix mixture may result in the vaporization of the matrix and the analyte. The laser induced desorption provides high ion yields of the intact analyte and allows for measurement of compounds with high accuracy. Samples may be analyzed using methods known in the art (e.g., Lewis, Wei and Siuzdak, Encyclopedia of Analytical Chemistry 2000:5880-5894; herein incorporated by reference in its entirety). As non-limiting examples, mass analyzers used in the MALDI analysis may include a linear time-of-flight (TOF), a TOF reflectron or a Fourier transform mass analyzer.

[0641] In one embodiment, the analyte-matrix mixture may be formed using the dried-droplet method. A biologic sample is mixed with a matrix to create a saturated matrix solution where the matrix-to-sample ratio is approximately 5000:1. An aliquot (approximately 0.5-2.0 uL) of the saturated matrix solution is then allowed to dry to form the analyte-matrix mixture.

[0642] In one embodiment, the analyte-matrix mixture may be formed using the thin-layer method. A matrix homogeneous film is first formed and then the sample is then applied and may be absorbed by the matrix to form the analyte-matrix mixture.

[0643] In one embodiment, the analyte-matrix mixture may be formed using the thick-layer method. A matrix homogeneous film is formed with a nitro-cellulose matrix additive. Once the uniform nitro-cellulose matrix layer is obtained the sample is applied and absorbed into the matrix to form the analyte-matrix mixture.

[0644] In one embodiment, the analyte-matrix mixture may be formed using the sandwich method. A thin layer of matrix crystals is prepared as in the thin-layer method followed by the addition of droplets of aqueous trifluoroacetic acid, the sample and matrix. The sample is then absorbed into the matrix to form the analyte-matrix mixture.

### Kits and Devices

### Kits

[0645] The invention provides a variety of kits for conveniently and/or effectively carrying out methods of the present invention. Typically kits will comprise sufficient amounts and/or numbers of components to allow a user to perform multiple treatments of a subject(s) and/or to perform multiple experiments.

[0646] In one aspect, the present invention provides kits for protein production, comprising a first modified nucleic acid molecule or mmRNA comprising a translatable region. The kit may further comprise packaging and instructions and/or a delivery agent to form a formulation composition. The delivery agent may comprise a saline, a buffered solution, a lipidoid or any delivery agent disclosed herein.

[0647] In one aspect, the present invention provides kits for protein production, comprising a first isolated nucleic acid comprising a translatable region and a nucleic acid modification, wherein the nucleic acid may be capable of evading an innate immune response of a cell into which the first isolated nucleic acid may be introduced, and packaging and instructions. The kit may further comprise a delivery agent to form a formulation composition. The delivery composition may comprise a lipidoid. The lipoid may be selected from the group consisting of C12-200, 98N12-5 and MD1.

[0648] In one embodiment, the buffer solution may include sodium chloride, calcium chloride, phosphate and/or EDTA. In another embodiment, the buffer solution may include, but is not limited to, saline, saline with 2 mM calcium, 5% sucrose, 5% sucrose with 2 mM calcium, 5% Mannitol, 5% Mannitol with 2 mM calcium, Ringer's lactate, sodium chloride, sodium chloride with 2 mM calcium and mannose (See e.g., U.S. Pub. No. 20120258046; herein incorporated by reference in its entirety). In a further embodiment, the buffer solutions may be precipitated or it may be lyophilized. The amount of each component may be varied to enable consistent, reproducible higher concentration saline or simple buffer formulations. The components may also be varied in order to increase the stability of modified nucleic acid molecules and mmRNA in the buffer solution over a period of time and/or under a variety of conditions.

[0649] In one aspect, the present invention provides kits for protein production, comprising: a first isolated nucleic acid comprising a translatable region, provided in an amount effective to produce a desired amount of a protein encoded by the translatable region when introduced into a target cell; a second nucleic acid comprising an inhibitory nucleic acid, provided in an amount effective to substantially inhibit the innate immune response of the cell; and packaging and instructions.

[0650] In one aspect, the present invention provides kits for protein production, comprising a modified nucleic acid molecule or mmRNA comprising a translatable region, wherein the nucleic acid exhibits reduced degradation by a cellular nuclease, and packaging and instructions.

[0651] In one aspect, the present invention provides kits for protein production, comprising a first isolated nucleic acid comprising a translatable region and a nucleoside modification, wherein the nucleic acid exhibits reduced degradation by a cellular nuclease, and packaging and instructions.

[0652] In one aspect, the present invention provides kits for protein production, comprising a first isolated nucleic acid comprising a translatable region and at least two different nucleoside modifications, wherein the nucleic acid exhibits reduced degradation by a cellular nuclease, and packaging and instructions.

[0653] In one aspect, the present invention provides kits for protein production, comprising a first isolated nucleic acid comprising a translatable region and at least one nucleoside modification, wherein the nucleic acid exhibits reduced degradation by a cellular nuclease; a second nucleic acid comprising an inhibitory nucleic acid; and packaging and instructions.

[0654] In some embodiments, the first isolated nucleic acid comprises messenger RNA (mRNA). In some embodiments the mRNA comprises at least one nucleoside selected from the group consisting of pyridin-4-one ribonucleoside, 5-aza-uridine, 2-thio-5-aza-uridine, 2-thiouridine, 4-thio-pseudouridine, 2-thio-pseudouridine, 5-hydroxyuridine, 3-methyluridine, 5-carboxymethyl-uridine, 1-carboxymethyl-pseudouridine, 5-propynyl-uridine, 1-propynyl-pseudouridine, 5-taurinomethyluridine, 1-taurinomethyl-pseudouridine, 5-taurinomethyl-2-thio-uridine, 1-taurinomethyl-4-thio-uridine, 5-methyl-uridine, 1-methyl-pseudouridine, 4-thio-1-methyl-pseudouridine, 2-thio-1-methyl-pseudouridine, 1-methyl-1-deaza-pseudouridine, 2-thio-1-methyl-1-deaza-pseudouridine, dihydrouridine, dihydropseudouridine, 2-thio-dihydrouridine, 2-thio-dihydropseudouridine, 2-methoxyuridine, 2-methoxy-4-thio-uridine, 4-methoxy-pseudouridine, and 4-methoxy-2-thio-pseudouridine.

[0655] In some embodiments, the mRNA comprises at least one nucleoside selected from the group consisting of 5-aza-cytidine, pseudoisocytidine, 3-methyl-cytidine, N4-acetylcytidine, 5-formylcytidine, N4-methylcytidine, 5-hydroxymethylcytidine, 1-methyl-pseudoisocytidine, pyrrolo-cytidine, pyrrolo-pseudoisocytidine, 2-thio-cytidine, 2-thio-5-methyl-cytidine, 4-thio-pseudoisocytidine, 4-thio-1-methyl-pseudoisocytidine, 4-thio-1-methyl-1-deaza-pseudoisocytidine, 1-methyl-1-deaza-pseudoisocytidine, zebularine, 5-aza-zebularine, 5-methyl-zebularine, 5-aza-2-thio-zebularine, 2-thio-zebularine, 2-methoxy-cytidine, 2-methoxy-5-methyl-cytidine, 4-methoxy-pseudoisocytidine, and 4-methoxy-1-methyl-pseudoisocytidine.

[0656] In some embodiments, the mRNA comprises at least one nucleoside selected from the group consisting of 2-aminopurine, 2,6-diaminopurine, 7-deaza-adenine, 7-deaza-8-aza-adenine, 7-deaza-2-aminopurine, 7-deaza-8-aza-2-aminopurine, 7-deaza-2,6-diaminopurine, 7-deaza-8-aza-2,6-diaminopurine, 1-methyladenosine, N6-methyladenosine, N6-isopentenyladenosine, N6-(cis-hydroxyisopentenyl)adenosine, 2-methylthio-N6-(cis-hydroxyisopentenyl) adenosine, N6-glycinylcarbamoyladenosine, N6-threonylcarbamoyladenosine, 2-methylthio-N6-threonyl carbamoyladenosine, N6,N6-dimethyladenosine, 7-methyladenine, 2-methylthio-adenine, and 2-methoxy-adenine.

[0657] In some embodiments, the mRNA comprises at least one nucleoside selected from the group consisting of inosine, 1-methyl-inosine, wyosine, wybutosine, 7-deaza-guanosine, 7-deaza-8-aza-guanosine, 6-thio-guanosine, 6-thio-7-deaza-guanosine, 6-thio-7-deaza-8-aza-guanosine, 7-methyl-guanosine, 6-thio-7-methyl-guanosine, 7-methylinosine, 6-methoxy-guanosine, 1-methylguanosine, N2-methylguanosine, N2,N2-dimethylguanosine, 8-oxo-guanosine, 7-methyl-8-oxo-guanosine, 1-methyl-6-thio-guanosine, N2-methyl-6-thio-guanosine, and N2,N2-dimethyl-6-thio-guanosine.

[0658] In another aspect, the disclosure provides compositions for protein production, comprising a first isolated nucleic acid comprising a translatable region and a nucleoside modification, wherein the nucleic acid exhibits reduced degradation by a cellular nuclease, and a mammalian cell suitable for translation of the translatable region of the first nucleic acid.

### Devices

[0659] The present invention provides for devices, in particular portable devices, which incorporate modified nucleosides and nucleotides into nucleic acids such as ribonucleic acids (RNA) that encode proteins of interest. These devices contain in a stable formulation the reagents to synthesize a modified RNA in a formulation available to be immediately delivered to a subject in need thereof, such as a human patient. Non-limiting examples of such a protein of interest include a growth factor and/or angiogenesis stimulator for wound healing, a peptide antibiotic to facilitate infection control, and an antigen to rapidly stimulate an immune response to a newly identified virus.

[0660] In some embodiments the device is self-contained, and is optionally capable of wireless remote access to obtain instructions for synthesis and/or analysis of the generated nucleic acid. The device is capable of mobile synthesis of at least one nucleic acid, and preferably an unlimited number of different nucleic acid sequences. In certain embodiments, the device is capable of being transported by one or a small number of individuals. In other embodiments, the device is scaled to fit on a benchtop or desk. In other embodiments, the device is scaled to fit into a suitcase, backpack or similarly sized object. In further embodiments, the device is scaled to fit into a vehicle, such as a car, truck or ambulance, or a military vehicle such as a tank or personnel carrier. The information necessary to generate a modified mRNA encoding protein of interest is present within a computer readable medium present in the device.

[0661] In some embodiments, the device is capable of communication (e.g., wireless communication) with a database of nucleic acid and polypeptide sequences. The device contains at least one sample block for insertion of one or more sample vessels. Such sample vessels are capable of accepting in liquid or other form any number of materials such as template DNA, nucleotides, enzymes, buffers, and other reagents. The sample vessels are also capable of being heated and cooled by contact with the sample block. The sample block is generally in communication with a device base with one or more electronic control units for the at least one sample block. The sample block preferably contains a heating module, such heating molecule capable of heating and/or cooling the sample vessels and contents thereof to temperatures between about −20 C and above +100 C. The device base is in communication with a voltage supply such as a battery or external voltage supply. The device also contains means for storing and distributing the materials for RNA synthesis.

[0662] Optionally, the sample block contains a module for separating the synthesized nucleic acids. Alternatively, the device contains a separation module operably linked to the sample block. Preferably the device contains a means for analysis of the synthesized nucleic acid. Such analysis includes sequence identity (demonstrated such as by hybridization), absence of non-desired sequences, measurement of integrity of synthesized mRNA (such has by microfluidic viscometry combined with spectrophotometry), and concentration and/or potency of modified RNA (such as by spectrophotometry).

[0663] In certain embodiments, the device is combined with a means for detection of pathogens present in a biological material obtained from a subject, e.g., the IBIS PLEX-ID system (Abbott) for microbial identification.

[0664] Suitable devices for use in delivering intradermal pharmaceutical compositions described herein include short needle devices such as those described in U.S. Pat. Nos. 4,886,499; 5,190,521; 5,328,483; 5,527,288; 4,270,537; 5,015,235; 5,141,496; and 5,417,662; each of which is herein incorporated by reference in their entirety. Intradermal compositions may be administered by devices which limit the effective penetration length of a needle into the skin, such as those described in PCT publication WO 99/34850 (herein incorporated by reference in its entirety) and functional equivalents thereof. Jet injection devices which deliver liquid compositions to the dermis via a liquid jet injector and/or via a needle which pierces the stratum corneum and produces a jet which reaches the dermis are suitable. Jet injection devices are described, for example, in U.S. Pat. Nos. 5,480,381; 5,599,302; 5,334,144; 5,993,412; 5,649,912; 5,569,189; 5,704,911; 5,383,851; 5,893,397; 5,466,220; 5,339,163; 5,312,335; 5,503,627; 5,064,413; 5,520,639; 4,596,556; 4,790,824; 4,941,880; 4,940,460; and PCT publications WO 97/37705 and WO 97/13537; each of which are herein incorporated by reference in their entirety. Ballistic powder/particle delivery devices which use compressed gas to accelerate vaccine in powder form through the outer layers of the skin to the dermis are suitable. Alternatively or additionally, conventional syringes may be used in the classical mantoux method of intradermal administration.

[0665] In some embodiments, the device may be a pump or comprise a catheter for administration of compounds or compositions of the invention across the blood brain barrier. Such devices include but are not limited to a pressurized olfactory delivery device, iontophoresis devices, multi-layered microfluidic devices, and the like. Such devices may be portable or stationary. They may be implantable or externally tethered to the body or combinations thereof

[0666] Devices for administration may be employed to deliver the modified nucleic acid molecules or mmRNA of the present invention according to single, multi- or split-dosing regimens taught herein. Such devices are described below.

[0667] Method and devices known in the art for multi-administration to cells, organs and tissues are contemplated for use in conjunction with the methods and compositions disclosed herein as embodiments of the present invention. These include, for example, those methods and devices having multiple needles, hybrid devices employing for example lumens or catheters as well as devices utilizing heat, electric current or radiation driven mechanisms.

[0668] According to the present invention, these multi-administration devices may be utilized to deliver the single, multi- or split doses contemplated herein.

[0669] A method for delivering therapeutic agents to a solid tissue has been described by Bahrami et al. and is taught for example in US Patent Publication 20110230839, the contents of which are incorporated herein by reference in their entirety. According to Bahrami, an array of needles is incorporated into a device which delivers a substantially equal amount of fluid at any location in said solid tissue along each needle's length.

[0670] A device for delivery of biological material across the biological tissue has been described by Kodgule et al. and is taught for example in US Patent Publication 20110172610, the contents of which are incorporated herein by reference in their entirety. According to Kodgule, multiple hollow micro-needles made of one or more metals and having outer diameters from about 200 microns to about 350 microns and lengths of at least 100 microns are incorporated into the device which delivers peptides, proteins, carbohydrates, nucleic acid molecules, lipids and other pharmaceutically active ingredients or combinations thereof.

[0671] A delivery probe for delivering a therapeutic agent to a tissue has been described by Gunday et al. and is taught for example in US Patent Publication 20110270184, the contents of each of which are incorporated herein by reference in their entirety. According to Gunday, multiple needles are incorporated into the device which moves the attached capsules between an activated position and an inactivated position to force the agent out of the capsules through the needles.

[0672] A multiple-injection medical apparatus has been described by Assaf and is taught for example in US Patent Publication 20110218497, the contents of which are incorporated herein by reference in their entirety. According to Assaf, multiple needles are incorporated into the device which has a chamber connected to one or more of said needles and a means for continuously refilling the chamber with the medical fluid after each injection.

[0673] In one embodiment, the modified nucleic acid molecule or mmRNA is administered subcutaneously or intramuscularly via at least 3 needles to three different, optionally adjacent, sites simultaneously, or within a 60 minutes period (e.g., administration to 4, 5, 6, 7, 8, 9, or 10 sites simultaneously or within a 60 minute period). The split doses can be administered simultaneously to adjacent tissue using the devices described in U.S. Patent Publication Nos. 20110230839 and 20110218497, each of which is incorporated herein by reference in their entirety.

[0674] An at least partially implantable system for injecting a substance into a patient's body, in particular a penis erection stimulation system has been described by Forsell and is taught for example in US Patent Publication 20110196198, the contents of which are incorporated herein by reference in their entirety. According to Forsell, multiple needles are incorporated into the device which is implanted along with one or more housings adjacent the patient's left and right corpora cavernosa. A reservoir and a pump are also implanted to supply drugs through the needles.

[0675] A method for the transdermal delivery of a therapeutic effective amount of iron has been described by Berenson and is taught for example in US Patent Publication 20100130910, the contents of which are incorporated herein by reference in their entirety. According to Berenson, multiple needles may be used to create multiple micro channels in stratum corneum to enhance transdermal delivery of the ionic iron on an iontophoretic patch.

[0676] A method for delivery of biological material across the biological tissue has been described by Kodgule et al and is taught for example in US Patent Publication 20110196308, the contents of which are incorporated herein by reference in their entirety. According to Kodgule, multiple biodegradable microneedles containing a therapeutic active ingredient are incorporated in a device which delivers proteins, carbohydrates, nucleic acid molecules, lipids and other pharmaceutically active ingredients or combinations thereof.

[0677] A transdermal patch comprising a botulinum toxin composition has been described by Donovan and is taught for example in US Patent Publication 20080220020, the contents of which are incorporated herein by reference in their entirety. According to Donovan, multiple needles are incorporated into the patch which delivers botulinum toxin under stratum corneum through said needles which project through the stratum corneum of the skin without rupturing a blood vessel.

[0678] A small, disposable drug reservoir, or patch pump, which can hold approximately 0.2 to 15 mL of liquid formulations can be placed on the skin and deliver the formulation continuously subcutaneously using a small bore needed (e.g., 26 to 34 gauge). As non-limiting examples, the patch pump may be 50 mm by 76 mm by 20 mm spring loaded having a 30 to 34 gauge needle (BD™ Microinfuser, Franklin Lakes N.J.), 41 mm by 62 mm by 17 mm with a 2 mL reservoir used for drug delivery such as insulin (OMNIPODO, Insulet Corporation Bedford, Mass.), or 43-60 mm diameter, 10 mm thick with a 0.5 to 10 mL reservoir (PATCHPUMP®, SteadyMed Therapeutics, San Francisco, Calif.). Further, the patch pump may be battery powered and/or rechargeable.

[0679] A cryoprobe for administration of an active agent to a location of cryogenic treatment has been described by Toubia and is taught for example in US Patent Publication 20080140061, the contents of which are incorporated herein by reference in their entirety. According to Toubia, multiple needles are incorporated into the probe which receives the active agent into a chamber and administers the agent to the tissue.

[0680] A method for treating or preventing inflammation or promoting healthy joints has been described by Stock et al and is taught for example in US Patent Publication 20090155186, the contents of which are incorporated herein by reference in their entirety. According to Stock, multiple needles are incorporated in a device which administers compositions containing signal transduction modulator compounds.

[0681] A multi-site injection system has been described by Kimmell et al. and is taught for example in US Patent Publication 20100256594, the contents of which are incorporated herein by reference in their entirety. According to Kimmell, multiple needles are incorporated into a device which delivers a medication into a stratum corneum through the needles.

[0682] A method for delivering interferons to the intradermal compartment has been described by Dekker et al. and is taught for example in US Patent Publication 20050181033, the contents of which are incorporated herein by reference in their entirety. According to Dekker, multiple needles having an outlet with an exposed height between 0 and 1 mm are incorporated into a device which improves pharmacokinetics and bioavailability by delivering the substance at a depth between 0.3 mm and 2 mm.

[0683] A method for delivering genes, enzymes and biological agents to tissue cells has described by Desai and is taught for example in US Patent Publication 20030073908, the contents of which are incorporated herein by reference in their entirety. According to Desai, multiple needles are incorporated into a device which is inserted into a body and delivers a medication fluid through said needles.

[0684] A method for treating cardiac arrhythmias with fibroblast cells has been described by Lee et al and is taught for example in US Patent Publication 20040005295, the contents of which are incorporated herein by reference in their entirety. According to Lee, multiple needles are incorporated into the device which delivers fibroblast cells into the local region of the tissue.

[0685] A method using a magnetically controlled pump for treating a brain tumor has been described by Shachar et al. and is taught for example in U.S. Pat. No. 7,799,012 (method) and U.S. Pat. No. 7,799,016 (device), the contents of which are incorporated herein by reference in their entirety. According Shachar, multiple needles were incorporated into the pump which pushes a medicating agent through the needles at a controlled rate.

[0686] Methods of treating functional disorders of the bladder in mammalian females have been described by Versi et al. and are taught for example in U.S. Pat. No. 8,029,496, the contents of which are incorporated herein by reference in their entirety. According to Versi, an array of micro-needles is incorporated into a device which delivers a therapeutic agent through the needles directly into the trigone of the bladder.

[0687] A micro-needle transdermal transport device has been described by Angel et al and is taught for example in U.S. Pat. No. 7,364,568, the contents of which are incorporated herein by reference in their entirety. According to Angel, multiple needles are incorporated into the device which transports a substance into a body surface through the needles which are inserted into the surface from different directions. The micro-needle transdermal transport device may be a solid micro-needle system or a hollow micro-needle system. As a non-limiting example, the solid micro-needle system may have up to a 0.5 mg capacity, with 300-1500 solid micro-needles per cm² about 150-700 μm tall coated with a drug. The micro-needles penetrate the stratum corneum and remain in the skin for short duration (e.g., 20 seconds to 15 minutes). In another example, the hollow micro-needle system has up to a 3 mL capacity to deliver liquid formulations using 15-20 microneedles per cm2 being approximately 950 μm tall. The micro-needles penetrate the skin to allow the liquid formulations to flow from the device into the skin. The hollow micro-needle system may be worn from 1 to 30 minutes depending on the formulation volume and viscosity.

[0688] A device for subcutaneous infusion has been described by Dalton et al and is taught for example in U.S. Pat. No. 7,150,726, the contents of which are incorporated herein by reference in their entirety. According to Dalton, multiple needles are incorporated into the device which delivers fluid through the needles into a subcutaneous tissue.

[0689] A device and a method for intradermal delivery of vaccines and gene therapeutic agents through microcannula have been described by Mikszta et al. and are taught for example in U.S. Pat. No. 7,473,247, the contents of which are incorporated herein by reference in their entirety. According to Mitszta, at least one hollow micro-needle is incorporated into the device which delivers the vaccines to the subject's skin to a depth of between 0.025 mm and 2 mm.

[0690] A method of delivering insulin has been described by Pettis et al and is taught for example in U.S. Pat. No. 7,722,595, the contents of which are incorporated herein by reference in their entirety. According to Pettis, two needles are incorporated into a device wherein both needles insert essentially simultaneously into the skin with the first at a depth of less than 2.5 mm to deliver insulin to intradermal compartment and the second at a depth of greater than 2.5 mm and less than 5.0 mm to deliver insulin to subcutaneous compartment.

[0691] Cutaneous injection delivery under suction has been described by Kochamba et al. and is taught for example in U.S. Pat. No. 6,896,666, the contents of which are incorporated herein by reference in their entirety. According to Kochamba, multiple needles in relative adjacency with each other are incorporated into a device which injects a fluid below the cutaneous layer.

[0692] A device for withdrawing or delivering a substance through the skin has been described by Down et al and is taught for example in U.S. Pat. No. 6,607,513, the contents of which are incorporated herein by reference in their entirety. According to Down, multiple skin penetrating members which are incorporated into the device have lengths of about 100 microns to about 2000 microns and are about 30 to 50 gauge.

[0693] A device for delivering a substance to the skin has been described by Palmer et al and is taught for example in U.S. Pat. No. 6,537,242, the contents of which are incorporated herein by reference in their entirety. According to Palmer, an array of micro-needles is incorporated into the device which uses a stretching assembly to enhance the contact of the needles with the skin and provides a more uniform delivery of the substance.

[0694] A perfusion device for localized drug delivery has been described by Zamoyski and is taught for example in U.S. Pat. No. 6,468,247, the contents of which are incorporated herein by reference in their entirety. According to Zamoyski, multiple hypodermic needles are incorporated into the device which injects the contents of the hypodermics into a tissue as said hypodermics are being refracted.

[0695] A method for enhanced transport of drugs and biological molecules across tissue by improving the interaction between micro-needles and human skin has been described by Prausnitz et al. and is taught for example in U.S. Pat. No. 6,743,211, the contents of which are incorporated herein by reference in their entirety. According to Prausnitz, multiple micro-needles are incorporated into a device which is able to present a more rigid and less deformable surface to which the micro-needles are applied.

[0696] A device for intraorgan administration of medicinal agents has been described by Ting et al and is taught for example in U.S. Pat. No. 6,077,251, the contents of which are incorporated herein by reference in their entirety. According to Ting, multiple needles having side openings for enhanced administration are incorporated into a device which by extending and retracting said needles from and into the needle chamber forces a medicinal agent from a reservoir into said needles and injects said medicinal agent into a target organ.

[0697] A multiple needle holder and a subcutaneous multiple channel infusion port has been described by Brown and is taught for example in U.S. Pat. No. 4,695,273, the contents of which are incorporated herein by reference in their entirety. According to Brown, multiple needles on the needle holder are inserted through the septum of the infusion port and communicate with isolated chambers in said infusion port.

[0698] A dual hypodermic syringe has been described by Horn and is taught for example in U.S. Pat. No. 3,552,394, the contents of which are incorporated herein by reference in their entirety. According to Horn, two needles incorporated into the device are spaced apart less than 68 mm and may be of different styles and lengths, thus enabling injections to be made to different depths.

[0699] A syringe with multiple needles and multiple fluid compartments has been described by Hershberg and is taught for example in U.S. Pat. No. 3,572,336, the contents of which are incorporated herein by reference in their entirety. According to Hershberg, multiple needles are incorporated into the syringe which has multiple fluid compartments and is capable of simultaneously administering incompatible drugs which are not able to be mixed for one injection.

[0700] A surgical instrument for intradermal injection of fluids has been described by Eliscu et al. and is taught for example in U.S. Pat. No. 2,588,623, the contents of which are incorporated herein by reference in their entirety. According to Eliscu, multiple needles are incorporated into the instrument which injects fluids intradermally with a wider disperse.

[0701] An apparatus for simultaneous delivery of a substance to multiple breast milk ducts has been described by Hung and is taught for example in EP 1818017, the contents of which are incorporated herein by reference in their entirety. According to Hung, multiple lumens are incorporated into the device which inserts though the orifices of the ductal networks and delivers a fluid to the ductal networks.

[0702] A catheter for introduction of medications to the tissue of a heart or other organs has been described by Tkebuchava and is taught for example in WO2006138109, the contents of which are incorporated herein by reference in their entirety. According to Tkebuchava, two curved needles are incorporated which enter the organ wall in a flattened trajectory.

[0703] Devices for delivering medical agents have been described by Mckay et al. and are taught for example in WO2006118804, the content of which are incorporated herein by reference in their entirety. According to Mckay, multiple needles with multiple orifices on each needle are incorporated into the devices to facilitate regional delivery to a tissue, such as the interior disc space of a spinal disc.

[0704] A method for directly delivering an immunomodulatory substance into an intradermal space within a mammalian skin has been described by Pettis and is taught for example in WO2004020014, the contents of which are incorporated herein by reference in their entirety. According to Pettis, multiple needles are incorporated into a device which delivers the substance through the needles to a depth between 0.3 mm and 2 mm.

[0705] Methods and devices for administration of substances into at least two compartments in skin for systemic absorption and improved pharmacokinetics have been described by Pettis et al. and are taught for example in WO2003094995, the contents of which are incorporated herein by reference in their entirety. According to Pettis, multiple needles having lengths between about 300 μm and about 5 mm are incorporated into a device which delivers to intradermal and subcutaneous tissue compartments simultaneously.

[0706] A drug delivery device with needles and a roller has been described by Zimmerman et al. and is taught for example in WO2012006259, the contents of which are incorporated herein by reference in their entirety. According to Zimmerman, multiple hollow needles positioned in a roller are incorporated into the device which delivers the content in a reservoir through the needles as the roller rotates.

[0707] A drug delivery device such as a stent is known in the art and is taught for example in U.S. Pub. Nos. US20060020329, US20040172127 and US20100161032; the contents of which are herein incorporated by reference in their entirety. Formulations of the modified nucleic acid molecules and mmRNA described herein may be delivered using stents. Additionally, stents used herein may be able to deliver multiple modified nucleic acid molecules and/or formulations at the same or varied rates of delivery. Non-limiting examples of manufacturers of stents include CORDIS® (Miami, Fla.) (CYPHER®), Boston Scientific Corporation (Natick, Mass.) (TAXUS®), Medtronic (Minneapolis, Minn.) (ENDEAVOUR®) and Abbott (Abbott Park, Ill.) (XIENCE V®).

[0708] Methods and devices describing ex vivo systems of organs, tissues and/or portions thereof are known in the art, are described by Ingber et al. and are taught for example in International Pub. No. WO2012166903; the contents of which is herein incorporated by reference in its entirety. According to Ingber, in one embodiment, tissue may be maintained ex vivo by implanting a device in a subject to be colonized by cells, removing the implantation device and tissue in the device and providing perfusion fluid to the tissue. In another embodiment, the tissue removed from the subject may be implanted into a second subject.

Methods and Devices Utilizing Catheters and/or Lumens

[0709] Methods and devices using catheters and lumens may be employed to administer the mmRNA of the present invention on a single, multi- or split dosing schedule. Such methods and devices are described below.

[0710] A catheter-based delivery of skeletal myoblasts to the myocardium of damaged hearts has been described by Jacoby et al and is taught for example in US Patent Publication 20060263338, the contents of which are incorporated herein by reference in their entirety. According to Jacoby, multiple needles are incorporated into the device at least part of which is inserted into a blood vessel and delivers the cell composition through the needles into the localized region of the subject's heart.

[0711] An apparatus for treating asthma using neurotoxin has been described by Deem et al and is taught for example in US Patent Publication 20060225742, the contents of which are incorporated herein by reference in their entirety. According to Deem, multiple needles are incorporated into the device which delivers neurotoxin through the needles into the bronchial tissue.

[0712] A method for administering multiple-component therapies has been described by Nayak and is taught for example in U.S. Pat. No. 7,699,803, the contents of which are incorporated herein by reference in their entirety. According to Nayak, multiple injection cannulas may be incorporated into a device wherein depth slots may be included for controlling the depth at which the therapeutic substance is delivered within the tissue.

[0713] A surgical device for ablating a channel and delivering at least one therapeutic agent into a desired region of the tissue has been described by McIntyre et al and is taught for example in U.S. Pat. No. 8,012,096, the contents of which are incorporated herein by reference in their entirety. According to McIntyre, multiple needles are incorporated into the device which dispenses a therapeutic agent into a region of tissue surrounding the channel and is particularly well suited for transmyocardial revascularization operations.

[0714] Methods of treating functional disorders of the bladder in mammalian females have been described by Versi et al and are taught for example in U.S. Pat. No. 8,029,496, the contents of which are incorporated herein by reference in their entirety. According to Versi, an array of micro-needles is incorporated into a device which delivers a therapeutic agent through the needles directly into the trigone of the bladder.

[0715] A device and a method for delivering fluid into a flexible biological barrier have been described by Yeshurun et al. and are taught for example in U.S. Pat. No. 7,998,119 (device) and U.S. Pat. No. 8,007,466 (method), the contents of which are incorporated herein by reference in their entirety. According to Yeshurun, the micro-needles on the device penetrate and extend into the flexible biological barrier and fluid is injected through the bore of the hollow micro-needles.

[0716] A method for epicardially injecting a substance into an area of tissue of a heart having an epicardial surface and disposed within a torso has been described by Bonner et al and is taught for example in U.S. Pat. No. 7,628,780, the contents of which are incorporated herein by reference in their entirety. According to Bonner, the devices have elongate shafts and distal injection heads for driving needles into tissue and injecting medical agents into the tissue through the needles.

[0717] A device for sealing a puncture has been described by Nielsen et al and is taught for example in U.S. Pat. No. 7,972,358, the contents of which are incorporated herein by reference in their entirety. According to Nielsen, multiple needles are incorporated into the device which delivers a closure agent into the tissue surrounding the puncture tract.

[0718] A method for myogenesis and angiogenesis has been described by Chiu et al. and is taught for example in U.S. Pat. No. 6,551,338, the contents of which are incorporated herein by reference in their entirety. According to Chiu, 5 to 15 needles having a maximum diameter of at least 1.25 mm and a length effective to provide a puncture depth of 6 to 20 mm are incorporated into a device which inserts into proximity with a myocardium and supplies an exogeneous angiogenic or myogenic factor to said myocardium through the conduits which are in at least some of said needles.

[0719] A method for the treatment of prostate tissue has been described by Bolmsj et al. and is taught for example in U.S. Pat. No. 6,524,270, the contents of which are incorporated herein by reference in their entirety. According to Bolmsj, a device comprising a catheter which is inserted through the urethra has at least one hollow tip extendible into the surrounding prostate tissue. An astringent and analgesic medicine is administered through said tip into said prostate tissue.

[0720] A method for infusing fluids to an intraosseous site has been described by Findlay et al. and is taught for example in U.S. Pat. No. 6,761,726, the contents of which are incorporated herein by reference in their entirety. According to Findlay, multiple needles are incorporated into a device which is capable of penetrating a hard shell of material covered by a layer of soft material and delivers a fluid at a predetermined distance below said hard shell of material.

[0721] A device for injecting medications into a vessel wall has been described by Vigil et al. and is taught for example in U.S. Pat. No. 5,713,863, the contents of which are incorporated herein by reference in their entirety. According to Vigil, multiple injectors are mounted on each of the flexible tubes in the device which introduces a medication fluid through a multi-lumen catheter, into said flexible tubes and out of said injectors for infusion into the vessel wall.

[0722] A catheter for delivering therapeutic and/or diagnostic agents to the tissue surrounding a bodily passageway has been described by Faxon et al. and is taught for example in U.S. Pat. No. 5,464,395, the contents of which are incorporated herein by reference in their entirety. According to Faxon, at least one needle cannula is incorporated into the catheter which delivers the desired agents to the tissue through said needles which project outboard of the catheter.

[0723] Balloon catheters for delivering therapeutic agents have been described by Orr and are taught for example in WO2010024871, the contents of which are incorporated herein by reference in their entirety. According to Orr, multiple needles are incorporated into the devices which deliver the therapeutic agents to different depths within the tissue. In another aspect, drug-eluting balloons may be used to deliver the formulations described herein. The drug-eluting balloons may be used in target lesion applications such as, but are not limited to, in-stent restenosis, treating lesion in tortuous vessels, bifurcation lesions, femoral/popliteal lesions and below the knee lesions.

[0724] A device for delivering therapeutic agents (e.g., modified nucleic acid molecules or mmRNA) to tissue disposed about a lumin has been described by Perry et al. and is taught for example in U.S. Pat. Pub. US20100125239, the contents of which are herein incorporated by reference in their entirety. According to Perry, the catheter has a balloon which may be coated with a therapeutic agent by methods known in the art and described in Perry. When the balloon expands, the therapeutic agent will contact the surrounding tissue. The device may additionally have a heat source to change the temperature of the coating on the balloon to release the therapeutic agent to the tissue.

### Methods and Devices Utilizing Electrical Current

[0725] Methods and devices utilizing electric current may be employed to deliver the mmRNA of the present invention according to the single, multi- or split dosing regimens taught herein. Such methods and devices are described below.

[0726] An electro collagen induction therapy device has been described by Marquez and is taught for example in US Patent Publication 20090137945, the contents of which are incorporated herein by reference in their entirety. According to Marquez, multiple needles are incorporated into the device which repeatedly pierce the skin and draw in the skin a portion of the substance which is applied to the skin first.

[0727] An electrokinetic system has been described by Etheredge et al. and is taught for example in US Patent Publication 20070185432, the contents of which are incorporated herein by reference in their entirety. According to Etheredge, micro-needles are incorporated into a device which drives by an electrical current the medication through the needles into the targeted treatment site.

[0728] An iontophoresis device has been described by Matsumura et al. and is taught for example in U.S. Pat. No. 7,437,189, the contents of which are incorporated herein by reference in their entirety. According to Matsumura, multiple needles are incorporated into the device which is capable of delivering ionizable drug into a living body at higher speed or with higher efficiency.

[0729] Intradermal delivery of biologically active agents by needle-free injection and electroporation has been described by Hoffmann et al and is taught for example in U.S. Pat. No. 7,171,264, the contents of which are incorporated herein by reference in their entirety. According to Hoffmann, one or more needle-free injectors are incorporated into an electroporation device and the combination of needle-free injection and electroporation is sufficient to introduce the agent into cells in skin, muscle or mucosa.

[0730] A method for electropermeabilization-mediated intracellular delivery has been described by Lundkvist et al. and is taught for example in U.S. Pat. No. 6,625,486, the contents of which are incorporated herein by reference in their entirety. According to Lundkvist, a pair of needle electrodes is incorporated into a catheter. Said catheter is positioned into a body lumen followed by extending said needle electrodes to penetrate into the tissue surrounding said lumen. Then the device introduces an agent through at least one of said needle electrodes and applies electric field by said pair of needle electrodes to allow said agent pass through the cell membranes into the cells at the treatment site.

[0731] A delivery system for transdermal immunization has been described by Levin et al. and is taught for example in WO2006003659, the contents of which are incorporated herein by reference in their entirety. According to Levin, multiple electrodes are incorporated into the device which applies electrical energy between the electrodes to generate micro channels in the skin to facilitate transdermal delivery.

[0732] A method for delivering RF energy into skin has been described by Schomacker and is taught for example in WO2011163264, the contents of which are incorporated herein by reference in their entirety. According to Schomacker, multiple needles are incorporated into a device which applies vacuum to draw skin into contact with a plate so that needles insert into skin through the holes on the plate and deliver RF energy.

[0733] Electroporation may be used to load cells, particles or vesicles with nucleic acids. Flow electroporation uses a flow of suspension which is subjected to an electric field.

[0734] Flow electroporation devices, methods and processes of electroporation have been described by Dzekunov et al and is taught for example in U.S. Pat. No. 7,029,916, U.S. Pat. Nos. 7,771,984, 7,141,425 WO2003018751 WO2005113820, US20110065171; Holaday et al and is taught for example in U.S. Pat. No. 6,773,669, US20050019311; Meserol et al and is taught for example in U.S. Pat. No. 6,074,605 and U.S. Pat. No. 5,720,921, the contents of each of which is herein incorporated by reference in its entirety. According to Dzekunov, Holaday and Meserol a chamber containing electrodes may be used for electroporation of a sample (e.g., cell and tissue). In US20080138877, herein incorporated by reference in its entirety, Dzekunov describes an electroporation chamber which may contain a sample (e.g., a suspension of cells to be electroporated). According to Dzekunov in WO2007021993, the contents of which are herein incorporated by reference in their entirety, the electrodes may be placed in different positions (e.g., helical geometries) to achieve the optimal electric field. As a non-limiting example, a flow electroporation device may be used to produce an infectious vector (See e.g., U.S. Pat. No. 7,186,559, the contents of which are herein incorporated by reference in its entirety).

[0735] A method for optimizing electroporation has been described by Dzekunov and is taught for example in WO2010009252 and US20120088842, the contents of each of which are incorporated herein by reference in their entirety. According to Dzekunov electrical pulses are used with other electroporation parameters to increase the electrical conductivity in the electroporation medium.

[0736] A method for streaming electroporation has been described by Dzekunov et al and is taught for example in WO2004031353 and US20040115784, each of which is herein incorporated by reference in its entirety. According to Dzekunov electroporation may be effected by displacing a sample across electric field lines or a electric field which is substantially constant in terms of magnitude.

[0737] A method of using electroporation to load antigens into cells is described by Liu et al and is taught for example in US20040214333, US20060134067, WO2004074451 and WO2007028041, the contents of each are herein incorporated by reference in their entireties. In addition Liu et al also describes a method of gene transfer to cancer cells using electroporation in WO2006063301 and US2006165668, each of which are herein incorporated by reference in their entirety.

[0738] A method of transiently modifying cells using electroporation is described by Li et al and is taught for example in WO2009126789 and US20090257991, the contents of each of which are herein incorporated by reference in its entirety.

[0739] An apparatus and method for shielding electrodes during electroporation is described by Li et al and is taught for example in WO2007021994, the contents of which are herein incorporated by reference in their entirety. According to Li a barrier such as a conductive and water permeable barrier may be used in operative relation to the electrode.

[0740] A computerized electroporation device and method are described by Dzekunov et al, and is taught for example in WO2006060409 and U.S. Pat. No. 7,991,559, the contents of each of which are herein incorporated by reference in their entireties. According to Dzekunov the electroporation device may be a flow electroporation device controlled by a computer with user-defined processing controls.

### DEFINITIONS

[0741] At various places in the present specification, substituents of compounds of the present disclosure are disclosed in groups or in ranges. It is specifically intended that the present disclosure include each and every individual subcombination of the members of such groups and ranges. For example, the term “C₁₋₆ alkyl” is specifically intended to individually disclose methyl, ethyl, C₃ alkyl, C₄ alkyl, C₅ alkyl, and C₆ alkyl.

[0742] About: As used herein, the term “about” means+/−10% of the recited value.

[0743] Administered in combination: As used herein, the term “administered in combination” or “combined administration” means that two or more agents (e.g., a modified nucleic acid or mmRNA encoding an anti-microbial polypeptide (e.g., an anti-bacterial polypeptide), e.g., an anti-microbial polypeptide described herein and an anti-microbial agent (e.g., an anti-microbial polypeptide or a small molecule anti-microbial compound described herein)) are administered to a subject at the same time or within an interval such that there may be an overlap of an effect of each agent on the patient. In some embodiments, they are administered within about 60, 30, 15, 10, 5, or 1 minute of one another. In some embodiments, the administrations of the agents are spaced sufficiently close together such that a combinatorial (e.g., a synergistic) effect is achieved.

[0744] Animal: As used herein, the term “animal” refers to any member of the animal kingdom. In some embodiments, “animal” refers to humans at any stage of development. In some embodiments, “animal” refers to non-human animals at any stage of development. In certain embodiments, the non-human animal is a mammal (e.g., a rodent, a mouse, a rat, a rabbit, a monkey, a dog, a cat, a sheep, cattle, a primate, or a pig). In some embodiments, animals include, but are not limited to, mammals, birds, reptiles, amphibians, fish, and worms. In some embodiments, the animal is a transgenic animal, genetically-engineered animal, or a clone.

[0745] Antigens of interest or desired antigens: As used herein, the terms “antigens of interest” or “desired antigens” include those proteins and other biomolecules provided herein that are immunospecifically bound by the antibodies and fragments, mutants, variants, and alterations thereof described herein. Examples of antigens of interest include, but are not limited to, insulin, insulin-like growth factor, hGH, tPA, cytokines, such as interleukins (IL), e.g., IL-1, IL-2, IL-3, IL-4, IL-5, IL-6, IL-7, IL-8, IL-9, IL-10, IL-11, IL-12, IL-13, IL-14, IL-15, IL-16, IL-17, IL-18, interferon (IFN) alpha, IFN beta, IFN gamma, IFN omega or IFN tau, tumor necrosis factor (TNF), such as TNF alpha and TNF beta, TNF gamma, TRAIL; G-CSF, GM-CSF, M-CSF, MCP-1 and VEGF.

[0746] Approximately: As used herein, the term “approximately” or “about,” as applied to one or more values of interest, refers to a value that is similar to a stated reference value. In certain embodiments, the term “approximately” or “about” refers to a range of values that fall within 25%, 20%, 19%, 18%, 17%, 16%, 15%, 14%, 13%, 12%, 11%, 10%, 9%, 8%, 7%, 6%, 5%, 4%, 3%, 2%, 1%, or less in either direction (greater than or less than) of the stated reference value unless otherwise stated or otherwise evident from the context (except where such number would exceed 100% of a possible value).

[0747] Associated with: As used herein, the terms “associated with,” “conjugated,” “linked,” “attached,” and “tethered,” when used with respect to two or more moieties, means that the moieties are physically associated or connected with one another, either directly or via one or more additional moieties that serves as a linking agent, to form a structure that is sufficiently stable so that the moieties remain physically associated under the conditions in which the structure is used, e.g., physiological conditions. An “association” need not be strictly through direct covalent chemical bonding. It may also suggest ionic or hydrogen bonding or a hybridization based connectivity sufficiently stable such that the “associated” entities remain physically associated.

[0748] Bifunctional: As used herein, the term “bifunctional” refers to any substance, molecule or moiety which is capable of or maintains at least two functions. The functions may effect the same outcome or a different outcome. The structure that produces the function may be the same or different. For example, bifunctional modified RNA of the present invention may encode a cytotoxic peptide (a first function) while those nucleosides which comprise the encoding RNA are, in and of themselves, cytotoxic (second function). In this example, delivery of the bifunctional modified RNA to a cancer cell would produce not only a peptide or protein molecule which may ameliorate or treat the cancer but would also deliver a cytotoxic payload of nucleosides to the cell should degradation, instead of translation of the modified RNA, occur.

[0749] Biocompatible: As used herein, the term “biocompatible” means compatible with living cells, tissues, organs or systems posing little to no risk of injury, toxicity or rejection by the immune system.

[0750] Biodegradable: As used herein, the term “biodegradable” means capable of being broken down into innocuous products by the action of living things.

[0751] Biologically active: As used herein, the phrase “biologically active” refers to a characteristic of any substance that has activity in a biological system and/or organism. For instance, a substance that, when administered to an organism, has a biological affect on that organism, is considered to be biologically active. In particular embodiments, a nucleic acid molecule of the present invention may be considered biologically active if even a portion of the nucleic acid molecule is biologically active or mimics an activity considered biologically relevant.

[0752] Chemical terms: The following provides the definition of various chemical terms from “acyl” to “thiol.”

[0753] The term “acyl,” as used herein, represents a hydrogen or an alkyl group (e.g., a haloalkyl group), as defined herein, that is attached to the parent molecular group through a carbonyl group, as defined herein, and is exemplified by formyl (i.e., a carboxyaldehyde group), acetyl, propionyl, butanoyl and the like. Exemplary unsubstituted acyl groups include from 1 to 7, from 1 to 11, or from 1 to 21 carbons. In some embodiments, the alkyl group is further substituted with 1, 2, 3, or 4 substituents as described herein.

[0754] The term “acylamino,” as used herein, represents an acyl group, as defined herein, attached to the parent molecular group though an amino group, as defined herein (i.e., —N(R^{N1})—C(O)—R, where R is H or an optionally substituted C₁₋₆, C₁₋₁₀, or C₁₋₂₀ alkyl group and R^{N1} is as defined herein). Exemplary unsubstituted acylamino groups include from 1 to 41 carbons (e.g., from 1 to 7, from 1 to 13, from 1 to 21, from 2 to 7, from 2 to 13, from 2 to 21, or from 2 to 41 carbons). In some embodiments, the alkyl group is further substituted with 1, 2, 3, or 4 substituents as described herein, and/or the amino group is —NH₂ or —NHR^{N1}, wherein R^{N1} is, independently, OH, NO₂, NH₂, NR^{N2}₂, SO₂OR^{N2}, SO₂R^{N2}, SOR^{N2}, alkyl, or aryl, and each R^{N2} can be H, alkyl, or aryl.

[0755] The term “acyloxy,” as used herein, represents an acyl group, as defined herein, attached to the parent molecular group though an oxygen atom (i.e., —O—C(O)—R, where R is H or an optionally substituted C₁₋₆, C₁₋₁₀, or C₁₋₂₀ alkyl group). Exemplary unsubstituted acyloxy groups include from 1 to 21 carbons (e.g., from 1 to 7 or from 1 to 11 carbons). In some embodiments, the alkyl group is further substituted with 1, 2, 3, or 4 substituents as described herein, and/or the amino group is —NH₂ or —NHR^{N1}, wherein R^{N1} is, independently, OH, NO₂, NH₂, NR^{N2}₂, SO₂OR^{N2}, SO₂R^{N2}, SOR^{N2}, alkyl, or aryl, and each R^{N2} can be H, alkyl, or aryl.

[0756] The term “alkaryl,” as used herein, represents an aryl group, as defined herein, attached to the parent molecular group through an alkylene group, as defined herein. Exemplary unsubstituted alkaryl groups are from 7 to 30 carbons (e.g., from 7 to 16 or from 7 to 20 carbons, such as C₁₋₆ alk-C₆₋₁₀ aryl, C₁₋₁₀ alk-C₆₋₁₀ aryl, or C₁₋₂₀ alk-C₆₋₁₀ aryl). In some embodiments, the alkylene and the aryl each can be further substituted with 1, 2, 3, or 4 substituent groups as defined herein for the respective groups. Other groups preceded by the prefix “alk-” are defined in the same manner, where “alk” refers to a C₁₋₆ alkylene, unless otherwise noted, and the attached chemical structure is as defined herein.

[0757] The term “alkcycloalkyl” represents a cycloalkyl group, as defined herein, attached to the parent molecular group through an alkylene group, as defined herein (e.g., an alkylene group of from 1 to 4, from 1 to 6, from 1 to 10, or form 1 to 20 carbons). In some embodiments, the alkylene and the cycloalkyl each can be further substituted with 1, 2, 3, or 4 substituent groups as defined herein for the respective group.

[0758] The term “alkenyl,” as used herein, represents monovalent straight or branched chain groups of, unless otherwise specified, from 2 to 20 carbons (e.g., from 2 to 6 or from 2 to 10 carbons) containing one or more carbon-carbon double bonds and is exemplified by ethenyl, 1-propenyl, 2-propenyl, 2-methyl-1-propenyl, 1-butenyl, 2-butenyl, and the like. Alkenyls include both cis and trans isomers. Alkenyl groups may be optionally substituted with 1, 2, 3, or 4 substituent groups that are selected, independently, from amino, aryl, cycloalkyl, or heterocyclyl (e.g., heteroaryl), as defined herein, or any of the exemplary alkyl substituent groups described herein.

[0759] The term “alkenyloxy” represents a chemical substituent of formula —OR, where R is a C₂₋₂₀ alkenyl group (e.g., C₂₋₆ or C₂₋₁₀ alkenyl), unless otherwise specified. Exemplary alkenyloxy groups include ethenyloxy, propenyloxy, and the like. In some embodiments, the alkenyl group can be further substituted with 1, 2, 3, or 4 substituent groups as defined herein (e.g., a hydroxy group).

[0760] The term “alkheteroaryl” refers to a heteroaryl group, as defined herein, attached to the parent molecular group through an alkylene group, as defined herein. Exemplary unsubstituted alkheteroaryl groups are from 2 to 32 carbons (e.g., from 2 to 22, from 2 to 18, from 2 to 17, from 2 to 16, from 3 to 15, from 2 to 14, from 2 to 13, or from 2 to 12 carbons, such as C₁₋₆ alk-C₁₋₁₂ heteroaryl, C₁₋₁₀ alk-C₁₋₁₂ heteroaryl, or C₁₋₂₀ alk-C₁₋₁₂ heteroaryl). In some embodiments, the alkylene and the heteroaryl each can be further substituted with 1, 2, 3, or 4 substituent groups as defined herein for the respective group. Alkheteroaryl groups are a subset of alkheterocyclyl groups.

[0761] The term “alkheterocyclyl” represents a heterocyclyl group, as defined herein, attached to the parent molecular group through an alkylene group, as defined herein. Exemplary unsubstituted alkheterocyclyl groups are from 2 to 32 carbons (e.g., from 2 to 22, from 2 to 18, from 2 to 17, from 2 to 16, from 3 to 15, from 2 to 14, from 2 to 13, or from 2 to 12 carbons, such as C₁₋₆ alk-C₁₋₁₂ heterocyclyl, C₁₋₁₀ alk-C₁₋₁₂ heterocyclyl, or C₁₋₂₀ alk-C₁₋₁₂ heterocyclyl). In some embodiments, the alkylene and the heterocyclyl each can be further substituted with 1, 2, 3, or 4 substituent groups as defined herein for the respective group.

[0762] The term “alkoxy” represents a chemical substituent of formula —OR, where R is a C₁₋₂₀ alkyl group (e.g., C₁₋₆ or C₁₋₁₀ alkyl), unless otherwise specified. Exemplary alkoxy groups include methoxy, ethoxy, propoxy (e.g., n-propoxy and isopropoxy), t-butoxy, and the like. In some embodiments, the alkyl group can be further substituted with 1, 2, 3, or 4 substituent groups as defined herein (e.g., hydroxy or alkoxy).

[0763] The term “alkoxyalkoxy” represents an alkoxy group that is substituted with an alkoxy group. Exemplary unsubstituted alkoxyalkoxy groups include between 2 to 40 carbons (e.g., from 2 to 12 or from 2 to 20 carbons, such as C₁₋₆ alkoxy-C₁₋₆ alkoxy, C₁₋₁₀ alkoxy-C₁₋₁₀ alkoxy, or C₁₋₂₀ alkoxy-C₁₋₂₀ alkoxy). In some embodiments, the each alkoxy group can be further substituted with 1, 2, 3, or 4 substituent groups as defined herein.

[0764] The term “alkoxyalkyl” represents an alkyl group that is substituted with an alkoxy group. Exemplary unsubstituted alkoxyalkyl groups include between 2 to 40 carbons (e.g., from 2 to 12 or from 2 to 20 carbons, such as C₁₋₆ alkoxy-C₁₋₆ alkyl, C₁₋₁₀ alkoxy-C₁₋₁₀ alkyl, or C₁₋₂₀ alkoxy-C₁₋₂₀ alkyl). In some embodiments, the alkyl and the alkoxy each can be further substituted with 1, 2, 3, or 4 substituent groups as defined herein for the respective group.

[0765] The term “alkoxycarbonyl,” as used herein, represents an alkoxy, as defined herein, attached to the parent molecular group through a carbonyl atom (e.g., —C(O)—OR, where R is H or an optionally substituted C₁₋₆, C₁₋₁₀, or C₁₋₂₀ alkyl group). Exemplary unsubstituted alkoxycarbonyl include from 1 to 21 carbons (e.g., from 1 to 11 or from 1 to 7 carbons). In some embodiments, the alkoxy group is further substituted with 1, 2, 3, or 4 substituents as described herein.

[0766] The term “alkoxycarbonylalkoxy,” as used herein, represents an alkoxy group, as defined herein, that is substituted with an alkoxycarbonyl group, as defined herein (e.g., —O-alkyl-C(O)—OR, where R is an optionally substituted C₁₋₆, C₁₋₁₀, or C₁₋₂₀ alkyl group). Exemplary unsubstituted alkoxycarbonylalkoxy include from 3 to 41 carbons (e.g., from 3 to 10, from 3 to 13, from 3 to 17, from 3 to 21, or from 3 to 31 carbons, such as C₁₋₆ alkoxycarbonyl-C₁₋₆ alkoxy, C₁₋₁₀ alkoxycarbonyl-C₁₋₁₀ alkoxy, or C₁₋₂₀ alkoxycarbonyl-C₁₋₂₀ alkoxy). In some embodiments, each alkoxy group is further independently substituted with 1, 2, 3, or 4 substituents, as described herein (e.g., a hydroxy group).

[0767] The term “alkoxycarbonylalkyl,” as used herein, represents an alkyl group, as defined herein, that is substituted with an alkoxycarbonyl group, as defined herein (e.g., -alkyl-C(O)—OR, where R is an optionally substituted C₁₋₂₀, C₁₋₁₀, or C₁₋₆ alkyl group). Exemplary unsubstituted alkoxycarbonylalkyl include from 3 to 41 carbons (e.g., from 3 to 10, from 3 to 13, from 3 to 17, from 3 to 21, or from 3 to 31 carbons, such as C₁₋₆ alkoxycarbonyl-C₁₋₆ alkyl, C₁₋₁₀ alkoxycarbonyl-C₁₋₁₀ alkyl, or C₁₋₂₀ alkoxycarbonyl-C₁₋₂₀ alkyl). In some embodiments, each alkyl and alkoxy group is further independently substituted with 1, 2, 3, or 4 substituents as described herein (e.g., a hydroxy group).

[0768] The term “alkyl,” as used herein, is inclusive of both straight chain and branched chain saturated groups from 1 to 20 carbons (e.g., from 1 to 10 or from 1 to 6), unless otherwise specified. Alkyl groups are exemplified by methyl, ethyl, n- and iso-propyl, n-, sec-, iso- and tert-butyl, neopentyl, and the like, and may be optionally substituted with one, two, three, or, in the case of alkyl groups of two carbons or more, four substituents independently selected from the group consisting of: (1) C₁₋₆ alkoxy; (2) C₁₋₆ alkylsulfinyl; (3) amino, as defined herein (e.g., unsubstituted amino (i.e., —NH₂) or a substituted amino (i.e., —N(R^{N1})₂, where R^{N1} is as defined for amino); (4) C₆₋₁₀ aryl-C₁₋₆ alkoxy; (5) azido; (6) halo; (7) (C₂₋₉ heterocyclyl)oxy; (8) hydroxy; (9) nitro; (10) oxo (e.g., carboxyaldehyde or acyl); (11) C₁₋₇ spirocyclyl; (12) thioalkoxy; (13) thiol; (14) —CO₂R^{A′}, where R^{A′} is selected from the group consisting of (a) C₁₋₂₀ alkyl (e.g., C₁₋₆ alkyl), (b) C₂₋₂₀ alkenyl (e.g., C₂₋₆ alkenyl), (c) C₆₋₁₀ aryl, (d) hydrogen, (e) C₁₋₆ alk-C₆₋₁₀ aryl, (f) amino-C₁₋₂₀ alkyl, (g) polyethylene glycol of —(CH₂)ₛ₂(OCH₂CH₂)ₛ₁(CH₂)ₛ₃OR′, wherein s1 is an integer from 1 to 10 (e.g., from 1 to 6 or from 1 to 4), each of s2 and s3, independently, is an integer from 0 to 10 (e.g., from 0 to 4, from 0 to 6, from 1 to 4, from 1 to 6, or from 1 to 10), and R′ is H or C₁₋₂₀ alkyl, and (h) amino-polyethylene glycol of —NR^{N1}(CH₂)ₛ₂(CH₂CH₂O)ₛ₁(CH₂)ₛ₃NR^{N1}, wherein s1 is an integer from 1 to 10 (e.g., from 1 to 6 or from 1 to 4), each of s2 and s3, independently, is an integer from 0 to 10 (e.g., from 0 to 4, from 0 to 6, from 1 to 4, from 1 to 6, or from 1 to 10), and each R^{N1} is, independently, hydrogen or optionally substituted C₁₋₆ alkyl; (15) —C(O)NR^{B′}R^{C′}, where each of R^{B′} and R^{C′} is, independently, selected from the group consisting of (a) hydrogen, (b) C₁₋₆ alkyl, (c) C₆₋₁₀ aryl, and (d) C₁₋₆ alk-C₆₋₁₀ aryl; (16) —SO₂R^{D′}, where R^{D′} is selected from the group consisting of (a) C₁₋₆ alkyl, (b) C₆₋₁₀ aryl, (c) C₁₋₆ alk-C₆₋₁₀ aryl, and (d) hydroxy; (17) —SO₂NR^{E′}R^{F′}, where each of R^{E′} and R^{F′} is, independently, selected from the group consisting of (a) hydrogen, (b) C₁₋₆ alkyl, (c) C₆₋₁₀ aryl and (d) C₁₋₆ alk-C₆₋₁₀ aryl; (18) —C(O)R^{G′}, where R^{G′} is selected from the group consisting of (a) C₁₋₂₀ alkyl (e.g., C₁₋₆ alkyl), (b) C₂₋₂₀ alkenyl (e.g., C₂₋₆ alkenyl), (c) C₆₋₁₀ aryl, (d) hydrogen, (e) C₁₋₆ alk-C₆₋₁₀ aryl, (f) amino-C₁₋₂₀ alkyl, (g) polyethylene glycol of —(CH₂)ₛ₂(OCH₂CH₂)ₛ₁(CH₂)ₛ₃OR′, wherein s1 is an integer from 1 to 10 (e.g., from 1 to 6 or from 1 to 4), each of s2 and s3, independently, is an integer from 0 to 10 (e.g., from 0 to 4, from 0 to 6, from 1 to 4, from 1 to 6, or from 1 to 10), and R′ is H or C₁₋₂₀ alkyl, and (h) amino-polyethylene glycol of —NR^{N1}(CH₂)ₛ₂(CH₂CH₂O)ₛ₁(CH₂)ₛ₃NR^{N1}, wherein s1 is an integer from 1 to 10 (e.g., from 1 to 6 or from 1 to 4), each of s2 and s3, independently, is an integer from 0 to 10 (e.g., from 0 to 4, from 0 to 6, from 1 to 4, from 1 to 6, or from 1 to 10), and each R^{N1} is, independently, hydrogen or optionally substituted C₁₋₆ alkyl; (19) —NR^{H′}C(O)R^{I′}, wherein R^{H′} is selected from the group consisting of (a1) hydrogen and (b1) C₁₋₆ alkyl, and R^{I′} is selected from the group consisting of (a2) C₁₋₂₀ alkyl (e.g., C₁₋₆ alkyl), (b2) C₂₋₂₀ alkenyl (e.g., C₂₋₆ alkenyl), (c2) C₆₋₁₀ aryl, (d2) hydrogen, (e2) C₁₋₆ alk-C₆₋₁₀ aryl, (f2) amino-C₁₋₂₀ alkyl, (g2) polyethylene glycol of —(CH₂)ₛ₂(OCH₂CH₂)ₛ₁(CH₂)ₛ₃OR′, wherein s1 is an integer from 1 to 10 (e.g., from 1 to 6 or from 1 to 4), each of s2 and s3, independently, is an integer from 0 to 10 (e.g., from 0 to 4, from 0 to 6, from 1 to 4, from 1 to 6, or from 1 to 10), and R′ is H or C₁₋₂₀ alkyl, and (h2) amino-polyethylene glycol of —NR^{N1}(CH₂)ₛ₂(CH₂CH₂O)ₛ₁(CH₂)ₛ₃NR^{N1}, wherein s1 is an integer from 1 to 10 (e.g., from 1 to 6 or from 1 to 4), each of s2 and s3, independently, is an integer from 0 to 10 (e.g., from 0 to 4, from 0 to 6, from 1 to 4, from 1 to 6, or from 1 to 10), and each R^{N1} is, independently, hydrogen or optionally substituted C₁₋₆ alkyl; (20) —NR^{J′}C(O)OR^{K′}, wherein R^{J′} is selected from the group consisting of (a1) hydrogen and (b1) C₁₋₆ alkyl, and R^{K′} is selected from the group consisting of (a2) C₁₋₂₀ alkyl (e.g., C₁₋₆ alkyl), (b2) C₂₋₂₀ alkenyl (e.g., C₂₋₆ alkenyl), (c2) C₆₋₁₀ aryl, (d2) hydrogen, (e2) C₁₋₆ alk-C₆₋₁₀ aryl, (f2) amino-C₁₋₂₀ alkyl, (g2) polyethylene glycol of —(CH₂)ₛ₂(OCH₂CH₂)ₛ₁(CH₂)ₛ₃OR′, wherein s1 is an integer from 1 to 10 (e.g., from 1 to 6 or from 1 to 4), each of s2 and s3, independently, is an integer from 0 to 10 (e.g., from 0 to 4, from 0 to 6, from 1 to 4, from 1 to 6, or from 1 to 10), and R′ is H or C₁₋₂₀ alkyl, and (h2) amino-polyethylene glycol of —NR^{N1}(CH₂)ₛ₂(CH₂CH₂O)ₛ₁(CH₂)ₛ₃NR^{N1}, wherein s1 is an integer from 1 to 10 (e.g., from 1 to 6 or from 1 to 4), each of s2 and s3, independently, is an integer from 0 to 10 (e.g., from 0 to 4, from 0 to 6, from 1 to 4, from 1 to 6, or from 1 to 10), and each R^{N1} is, independently, hydrogen or optionally substituted C₁₋₆ alkyl; and (21) amidine. In some embodiments, each of these groups can be further substituted as described herein. For example, the alkylene group of a C₁-alkaryl can be further substituted with an oxo group to afford the respective aryloyl substituent.

[0769] The term “alkylene” and the prefix “alk-,” as used herein, represent a saturated divalent hydrocarbon group derived from a straight or branched chain saturated hydrocarbon by the removal of two hydrogen atoms, and is exemplified by methylene, ethylene, isopropylene, and the like. The term “C_{x-y} alkylene” and the prefix “C_{x-y} alk-” represent alkylene groups having between x and y carbons. Exemplary values for x are 1, 2, 3, 4, 5, and 6, and exemplary values for y are 2, 3, 4, 5, 6, 7, 8, 9, 10, 12, 14, 16, 18, or 20 (e.g., C₁₋₆, C₁₋₁₀, C₂₋₂₀, C₂₋₆, C₂₋₁₀, or C₂₋₂₀ alkylene). In some embodiments, the alkylene can be further substituted with 1, 2, 3, or 4 substituent groups as defined herein for an alkyl group.

[0770] The term “alkylsulfinyl,” as used herein, represents an alkyl group attached to the parent molecular group through an —S(O)— group. Exemplary unsubstituted alkylsulfinyl groups are from 1 to 6, from 1 to 10, or from 1 to 20 carbons. In some embodiments, the alkyl group can be further substituted with 1, 2, 3, or 4 substituent groups as defined herein.

[0771] The term “alkylsulfinylalkyl,” as used herein, represents an alkyl group, as defined herein, substituted by an alkylsulfinyl group. Exemplary unsubstituted alkylsulfinylalkyl groups are from 2 to 12, from 2 to 20, or from 2 to 40 carbons. In some embodiments, each alkyl group can be further substituted with 1, 2, 3, or 4 substituent groups as defined herein.

[0772] The term “alkynyl,” as used herein, represents monovalent straight or branched chain groups from 2 to 20 carbon atoms (e.g., from 2 to 4, from 2 to 6, or from 2 to 10 carbons) containing a carbon-carbon triple bond and is exemplified by ethynyl, 1-propynyl, and the like. Alkynyl groups may be optionally substituted with 1, 2, 3, or 4 substituent groups that are selected, independently, from aryl, cycloalkyl, or heterocyclyl (e.g., heteroaryl), as defined herein, or any of the exemplary alkyl substituent groups described herein.

[0773] The term “alkynyloxy” represents a chemical substituent of formula —OR, where R is a C2-20 alkynyl group (e.g., C₂₋₆ or C₂₋₁₀ alkynyl), unless otherwise specified. Exemplary alkynyloxy groups include ethynyloxy, propynyloxy, and the like. In some embodiments, the alkynyl group can be further substituted with 1, 2, 3, or 4 substituent groups as defined herein (e.g., a hydroxy group).

[0774] The term “amidine,” as used herein, represents a —C(═NH)NH₂ group.

[0775] The term “amino,” as used herein, represents —N(R^{N1})₂, wherein each R^{N1} is, independently, H, OH, NO₂, N(R^{N2})₂, SO₂OR^{N2}, SO₂R^{N2}, SOR^{N2}, an N-protecting group, alkyl, alkenyl, alkynyl, alkoxy, aryl, alkaryl, cycloalkyl, alkcycloalkyl, carboxyalkyl, sulfoalkyl, heterocyclyl (e.g., heteroaryl), or alkheterocyclyl (e.g., alkheteroaryl), wherein each of these recited R^{N1} groups can be optionally substituted, as defined herein for each group; or two R^{N1} combine to form a heterocyclyl or an N-protecting group, and wherein each R^{N2} is, independently, H, alkyl, or aryl. The amino groups of the invention can be an unsubstituted amino (i.e., —NH₂) or a substituted amino (i.e., —N(R^{N1})₂). In a preferred embodiment, amino is —NH₂ or —NHR^{N1}, wherein R^{N1} is, independently, OH, NO₂, NH₂, NR^{N2}₂, SO₂OR^{N2}, SO₂R^{N2}, SOR^{N2}, alkyl, carboxyalkyl, sulfoalkyl, or aryl, and each R^{N2} can be H, C₁₋₂₀ alkyl (e.g., C₁₋₆ alkyl), or C₆₋₁₀ aryl.

[0776] The term “amino acid,” as described herein, refers to a molecule having a side chain, an amino group, and an acid group (e.g., a carboxy group of —CO₂H or a sulfo group of —SO₃H), wherein the amino acid is attached to the parent molecular group by the side chain, amino group, or acid group (e.g., the side chain). In some embodiments, the amino acid is attached to the parent molecular group by a carbonyl group, where the side chain or amino group is attached to the carbonyl group. Exemplary side chains include an optionally substituted alkyl, aryl, heterocyclyl, alkaryl, alkheterocyclyl, aminoalkyl, carbamoylalkyl, and carboxyalkyl. Exemplary amino acids include alanine, arginine, asparagine, aspartic acid, cysteine, glutamic acid, glutamine, glycine, histidine, hydroxynorvaline, isoleucine, leucine, lysine, methionine, norvaline, ornithine, phenylalanine, proline, pyrrolysine, selenocysteine, serine, taurine, threonine, tryptophan, tyrosine, and valine. Amino acid groups may be optionally substituted with one, two, three, or, in the case of amino acid groups of two carbons or more, four substituents independently selected from the group consisting of: (1) C₁₋₆ alkoxy; (2) C₁₋₆ alkylsulfinyl; (3) amino, as defined herein (e.g., unsubstituted amino (i.e., —NH₂) or a substituted amino (i.e., —N(R^{N1})₂, where R^{N1} is as defined for amino); (4) C₆₋₁₀ aryl-C₁₋₆ alkoxy; (5) azido; (6) halo; (7) (C₂₋₉ heterocyclyl)oxy; (8) hydroxy; (9) nitro; (10) oxo (e.g., carboxyaldehyde or acyl); (11) C₁₋₇ spirocyclyl; (12) thioalkoxy; (13) thiol; (14) —CO₂R^{A′}, where R^{A′} is selected from the group consisting of (a) C₁₋₂₀ alkyl (e.g., C₁₋₆ alkyl), (b) C₂₋₂₀ alkenyl (e.g., C₂₋₆ alkenyl), (c) C₆₋₁₀ aryl, (d) hydrogen, (e) C₁₋₆ alk-C₆₋₁₀ aryl, (f) amino-C₁₋₂₀ alkyl, (g) polyethylene glycol of —(CH₂)ₛ₂(OCH₂CH₂)ₛ₁(CH₂)ₛ₃OR′, wherein s1 is an integer from 1 to 10 (e.g., from 1 to 6 or from 1 to 4), each of s2 and s3, independently, is an integer from 0 to 10 (e.g., from 0 to 4, from 0 to 6, from 1 to 4, from 1 to 6, or from 1 to 10), and R′ is H or C₁₋₂₀ alkyl, and (h) amino-polyethylene glycol of —NR^{N1}(CH₂)ₛ₂(CH₂CH₂O)ₛ₁(CH₂)ₛ₃NR^{N1}, wherein s1 is an integer from 1 to 10 (e.g., from 1 to 6 or from 1 to 4), each of s2 and s3, independently, is an integer from 0 to 10 (e.g., from 0 to 4, from 0 to 6, from 1 to 4, from 1 to 6, or from 1 to 10), and each R^{N1} is, independently, hydrogen or optionally substituted C₁₋₆ alkyl; (15) —C(O)NR^{B′}R^{G′}, where each of R^{B′} and R^{C′} is, independently, selected from the group consisting of (a) hydrogen, (b) C₁₋₆ alkyl, (c) C₆₋₁₀ aryl, and (d) C₁₋₆ alk-C₆₋₁₀ aryl; (16) —SO₂R^{D′}, where R^{D′} is selected from the group consisting of (a) C₁₋₆ alkyl, (b) C₆₋₁₀ aryl, (c) C₁₋₆ alk-C₆₋₁₀ aryl, and (d) hydroxy; (17) —SO₂NR^{E′}R^{F′}, where each of R^{E′} and R^{F′} is, independently, selected from the group consisting of (a) hydrogen, (b) C₁₋₆ alkyl, (c) C₆₋₁₀ aryl and (d) C₁₋₆ alk-C₆₋₁₀ aryl; (18) —C(O)R^{G′}, where R^{G′} is selected from the group consisting of (a) C₁₋₂₀ alkyl (e.g., C₁₋₆ alkyl), (b) C₂₋₂₀ alkenyl (e.g., C₂₋₆ alkenyl), (c) C₆₋₁₀ aryl, (d) hydrogen, (e) C₁₋₆ alk-C₆₋₁₀ aryl, (f) amino-C₁₋₂₀ alkyl, (g) polyethylene glycol of —(CH₂)ₛ₂(OCH₂CH₂)ₛ₁(CH₂)ₛ₃OR′, wherein s1 is an integer from 1 to 10 (e.g., from 1 to 6 or from 1 to 4), each of s2 and s3, independently, is an integer from 0 to 10 (e.g., from 0 to 4, from 0 to 6, from 1 to 4, from 1 to 6, or from 1 to 10), and R′ is H or C₁₋₂₀ alkyl, and (h) amino-polyethylene glycol of —NR^{N1}(CH₂)ₛ₂(CH₂CH₂O)ₛ₁(CH₂)ₛ₃NR^{N1}, wherein s1 is an integer from 1 to 10 (e.g., from 1 to 6 or from 1 to 4), each of s2 and s3, independently, is an integer from 0 to 10 (e.g., from 0 to 4, from 0 to 6, from 1 to 4, from 1 to 6, or from 1 to 10), and each R^{N1} is, independently, hydrogen or optionally substituted C₁₋₆ alkyl; (19) —NR^{H′}C(O)R^{I′}, wherein R^{H′} is selected from the group consisting of (a1) hydrogen and (b1) C₁₋₆ alkyl, and R^{I′} is selected from the group consisting of (a2) C₁₋₂₀ alkyl (e.g., C₁₋₆ alkyl), (b2) C₂₋₂₀ alkenyl (e.g., C₂₋₆ alkenyl), (c2) C₆₋₁₀ aryl, (d2) hydrogen, (e2) C₁₋₆ alk-C₆₋₁₀ aryl, (f2) amino-C₁₋₂₀ alkyl, (g2) polyethylene glycol of —(CH₂)ₛ₂(OCH₂CH₂)ₛ₁(CH₂)ₛ₃OR′, wherein s1 is an integer from 1 to 10 (e.g., from 1 to 6 or from 1 to 4), each of s2 and s3, independently, is an integer from 0 to 10 (e.g., from 0 to 4, from 0 to 6, from 1 to 4, from 1 to 6, or from 1 to 10), and R′ is H or C₁₋₂₀ alkyl, and (h2) amino-polyethylene glycol of —NR^{N1}(CH₂)ₛ₂(CH₂CH₂O)ₛ₁(CH₂)ₛ₃NR^{N1}, wherein s1 is an integer from 1 to 10 (e.g., from 1 to 6 or from 1 to 4), each of s2 and s3, independently, is an integer from 0 to 10 (e.g., from 0 to 4, from 0 to 6, from 1 to 4, from 1 to 6, or from 1 to 10), and each R^{N1} is, independently, hydrogen or optionally substituted C₁₋₆ alkyl; (20) —NR^{J′}C(O)OR^{K′}, wherein R^{J′} is selected from the group consisting of (a1) hydrogen and (b1) C₁₋₆ alkyl, and R^{K′} is selected from the group consisting of (a2) C₁₋₂₀ alkyl (e.g., C₁₋₆ alkyl), (b2) C₂₋₂₀ alkenyl (e.g., C₂₋₆ alkenyl), (c2) C₆₋₁₀ aryl, (d2) hydrogen, (e2) C₁₋₆ alk-C₆₋₁₀ aryl, (f2) amino-C₁₋₂₀ alkyl, (g2) polyethylene glycol of —(CH₂)ₛ₂(OCH₂CH₂)ₛ₁(CH₂)ₛ₃OR′, wherein s1 is an integer from 1 to 10 (e.g., from 1 to 6 or from 1 to 4), each of s2 and s3, independently, is an integer from 0 to 10 (e.g., from 0 to 4, from 0 to 6, from 1 to 4, from 1 to 6, or from 1 to 10), and R′ is H or C₁₋₂₀ alkyl, and (h2) amino-polyethylene glycol of —NR^{N1}(CH₂)ₛ₂(CH₂CH₂O)ₛ₁(CH₂)ₛ₃NR^{N1}, wherein s1 is an integer from 1 to 10 (e.g., from 1 to 6 or from 1 to 4), each of s2 and s3, independently, is an integer from 0 to 10 (e.g., from 0 to 4, from 0 to 6, from 1 to 4, from 1 to 6, or from 1 to 10), and each R^{N1} is, independently, hydrogen or optionally substituted C₁₋₆ alkyl; and (21) amidine. In some embodiments, each of these groups can be further substituted as described herein.

[0777] The term “aminoalkoxy,” as used herein, represents an alkoxy group, as defined herein, substituted by an amino group, as defined herein. The alkyl and amino each can be further substituted with 1, 2, 3, or 4 substituent groups as described herein for the respective group (e.g., CO₂R^{A′}, where R^{A′} is selected from the group consisting of (a) C₁₋₆ alkyl, (b) C₆₋₁₀ aryl, (c) hydrogen, and (d) C₁₋₆ alk-C₆₋₁₀ aryl, e.g., carboxy).

[0778] The term “aminoalkyl,” as used herein, represents an alkyl group, as defined herein, substituted by an amino group, as defined herein. The alkyl and amino each can be further substituted with 1, 2, 3, or 4 substituent groups as described herein for the respective group (e.g., CO₂R^{A′}, where R^{A′} is selected from the group consisting of (a) C₁₋₆ alkyl, (b) C₆₋₁₀ aryl, (c) hydrogen, and (d) C₁₋₆ alk-C₆₋₁₀ aryl, e.g., carboxy).

[0779] The term “aryl,” as used herein, represents a mono-, bicyclic, or multicyclic carbocyclic ring system having one or two aromatic rings and is exemplified by phenyl, naphthyl, 1,2-dihydronaphthyl, 1,2,3,4-tetrahydronaphthyl, anthracenyl, phenanthrenyl, fluorenyl, indanyl, indenyl, and the like, and may be optionally substituted with 1, 2, 3, 4, or 5 substituents independently selected from the group consisting of: (1) C₁₋₇ acyl (e.g., carboxyaldehyde); (2) C₁₋₂₀ alkyl (e.g., C₁₋₆ alkyl, C₁₋₆ alkoxy-C₁₋₆ alkyl, C₁₋₆ alkylsulfinyl-C₁₋₆ alkyl, amino-C₁₋₆ alkyl, azido-C₁₋₆ alkyl, (carboxyaldehyde)-C₁₋₆ alkyl, halo-C₁₋₆ alkyl (e.g., perfluoroalkyl), hydroxy-C₁₋₆ alkyl, nitro-C₁₋₆ alkyl, or C₁₋₆ thioalkoxy-C₁₋₆ alkyl); (3) C₁₋₂₀ alkoxy (e.g., C₁₋₆ alkoxy, such as perfluoroalkoxy); (4) C₁₋₆ alkylsulfinyl; (5) C₆₋₁₀ aryl; (6) amino; (7) C₁₋₆ alk-C₆₋₁₀ aryl; (8) azido; (9) C₃₋₈ cycloalkyl; (10) C₁₋₆ alk-C₃₋₈ cycloalkyl; (11) halo; (12) C₁₋₁₂ heterocyclyl (e.g., C₁₋₆ heteroaryl); (13) (C₁₋₁₂ heterocyclyl)oxy; (14) hydroxy; (15) nitro; (16) C₁₋₂₀ thioalkoxy (e.g., C₁₋₆ thioalkoxy); (17) —(CH₂)_{q}CO₂R^{A′}, where q is an integer from zero to four, and R^{A′} is selected from the group consisting of (a) C₁₋₆ alkyl, (b) C₆₋₁₀ aryl, (c) hydrogen, and (d) C₁₋₆ alk-C₆₋₁₀ aryl; (18) —(CH₂)_{q}CONR^{B′}R^{C′}, where q is an integer from zero to four and where R^{B′} and R^{C′} are independently selected from the group consisting of (a) hydrogen, (b) C₁₋₆ alkyl, (c) C₆₋₁₀ aryl, and (d) C₁₋₆ alk-C₆₋₁₀ aryl; (19) —(CH₂)_{q}SO₂R^{D′}, where q is an integer from zero to four and where R^{D′} is selected from the group consisting of (a) alkyl, (b) C₆₋₁₀ aryl, and (c) alk-C₆₋₁₀ aryl; (20) —(CH₂)_{q}SO₂NR^{E′}R^{F′}, where q is an integer from zero to four and where each of R^{E′} and R^{F′} is, independently, selected from the group consisting of (a) hydrogen, (b) C₁₋₆ alkyl, (c) C₆₋₁₀ aryl, and (d) C₁₋₆ alk-C₆₋₁₀ aryl; (21) thiol; (22) C₆₋₁₀ aryloxy; (23) C₃₋₈ cycloalkoxy; (24) C₆₋₁₀ aryl-C₁₋₆ alkoxy; (25) C₁₋₆ alk-C₁₋₁₂ heterocyclyl (e.g., C₁₋₆ alk-C₁₋₁₂ heteroaryl); (26) C₂₋₂₀ alkenyl; and (27) C₂₋₂₀ alkynyl. In some embodiments, each of these groups can be further substituted as described herein. For example, the alkylene group of a C₁-alkaryl or a C₁-alkheterocyclyl can be further substituted with an oxo group to afford the respective aryloyl and (heterocyclyl)oyl substituent group.

[0780] The term “arylalkoxy,” as used herein, represents an alkaryl group, as defined herein, attached to the parent molecular group through an oxygen atom. Exemplary unsubstituted alkoxyalkyl groups include from 7 to 30 carbons (e.g., from 7 to 16 or from 7 to 20 carbons, such as C₆₋₁₀ aryl-C₁₋₆ alkoxy, C₆₋₁₀ aryl-C₁₋₁₀ alkoxy, or C₆₋₁₀ aryl-C₁₋₂₀ alkoxy). In some embodiments, the arylalkoxy group can be substituted with 1, 2, 3, or 4 substituents as defined herein

[0781] The term “aryloxy” represents a chemical substituent of formula —OR′, where R′ is an aryl group of 6 to 18 carbons, unless otherwise specified. In some embodiments, the aryl group can be substituted with 1, 2, 3, or 4 substituents as defined herein.

[0782] The term “aryloyl,” as used herein, represents an aryl group, as defined herein, that is attached to the parent molecular group through a carbonyl group. Exemplary unsubstituted aryloyl groups are of 7 to 11 carbons. In some embodiments, the aryl group can be substituted with 1, 2, 3, or 4 substituents as defined herein.

[0783] The term “azido” represents an —N₃ group, which can also be represented as —N═N═N.

[0784] The term “bicyclic,” as used herein, refer to a structure having two rings, which may be aromatic or non-aromatic. Bicyclic structures include spirocyclyl groups, as defined herein, and two rings that share one or more bridges, where such bridges can include one atom or a chain including two, three, or more atoms. Exemplary bicyclic groups include a bicyclic carbocyclyl group, where the first and second rings are carbocyclyl groups, as defined herein; a bicyclic aryl groups, where the first and second rings are aryl groups, as defined herein; bicyclic heterocyclyl groups, where the first ring is a heterocyclyl group and the second ring is a carbocyclyl (e.g., aryl) or heterocyclyl (e.g., heteroaryl) group; and bicyclic heteroaryl groups, where the first ring is a heteroaryl group and the second ring is a carbocyclyl (e.g., aryl) or heterocyclyl (e.g., heteroaryl) group. In some embodiments, the bicyclic group can be substituted with 1, 2, 3, or 4 substituents as defined herein for cycloalkyl, heterocyclyl, and aryl groups.

[0785] The terms “carbocyclic” and “carbocyclyl,” as used herein, refer to an optionally substituted C₃₋₁₂ monocyclic, bicyclic, or tricyclic structure in which the rings, which may be aromatic or non-aromatic, are formed by carbon atoms. Carbocyclic structures include cycloalkyl, cycloalkenyl, and aryl groups.

[0786] The term “carbamoyl,” as used herein, represents —C(O)—N(R^{N1})₂, where the meaning of each R^{N1} is found in the definition of “amino” provided herein.

[0787] The term “carbamoylalkyl,” as used herein, represents an alkyl group, as defined herein, substituted by a carbamoyl group, as defined herein. The alkyl group can be further substituted with 1, 2, 3, or 4 substituent groups as described herein.

[0788] The term “carbamyl,” as used herein, refers to a carbamate group having the structure —NR^{N1}C(═O)OR or —OC(═O)N(R^{N1})₂, where the meaning of each R^{N1} is found in the definition of “amino” provided herein, and R is alkyl, cycloalkyl, alkcycloalkyl, aryl, alkaryl, heterocyclyl (e.g., heteroaryl), or alkheterocyclyl (e.g., alkheteroaryl), as defined herein.

[0789] The term “carbonyl,” as used herein, represents a C(O) group, which can also be represented as C═O.

[0790] The term “carboxyaldehyde” represents an acyl group having the structure —CHO.

[0791] The term “carboxy,” as used herein, means —CO₂H.

[0792] The term “carboxyalkoxy,” as used herein, represents an alkoxy group, as defined herein, substituted by a carboxy group, as defined herein. The alkoxy group can be further substituted with 1, 2, 3, or 4 substituent groups as described herein for the alkyl group.

[0793] The term “carboxyalkyl,” as used herein, represents an alkyl group, as defined herein, substituted by a carboxy group, as defined herein. The alkyl group can be further substituted with 1, 2, 3, or 4 substituent groups as described herein.

[0794] The term “cyano,” as used herein, represents an —CN group.

[0795] The term “cycloalkoxy” represents a chemical substituent of formula —OR, where R is a C₃₋₈ cycloalkyl group, as defined herein, unless otherwise specified. The cycloalkyl group can be further substituted with 1, 2, 3, or 4 substituent groups as described herein. Exemplary unsubstituted cycloalkoxy groups are from 3 to 8 carbons.

[0796] The term “cycloalkyl,” as used herein represents a monovalent saturated or unsaturated non-aromatic cyclic hydrocarbon group from three to eight carbons, unless otherwise specified, and is exemplified by cyclopropyl, cyclobutyl, cyclopentyl, cyclohexyl, cycloheptyl, bicyclo[2.2.1]heptyl, and the like. When the cycloalkyl group includes one carbon-carbon double bond, the cycloalkyl group can be referred to as a “cycloalkenyl” group. Exemplary cycloalkenyl groups include cyclopentenyl, cyclohexenyl, and the like. The cycloalkyl groups of this invention can be optionally substituted with: (1) C₁₋₇ acyl (e.g., carboxyaldehyde); (2) C₁₋₂₀ alkyl (e.g., C₁₋₆ alkyl, C₁₋₆ alkoxy-C₁₋₆ alkyl, C₁₋₆ alkylsulfinyl-C₁₋₆ alkyl, amino-C₁₋₆ alkyl, azido-C₁₋₆ alkyl, (carboxyaldehyde)-C₁₋₆ alkyl, halo-C₁₋₆ alkyl (e.g., perfluoroalkyl), hydroxy-C₁₋₆ alkyl, nitro-C₁₋₆ alkyl, or C₁₋₆ thioalkoxy-C₁₋₆ alkyl); (3) C₁₋₂₀ alkoxy (e.g., C₁₋₆ alkoxy, such as perfluoroalkoxy); (4) C₁₋₆ alkylsulfinyl; (5) C₆₋₁₀ aryl; (6) amino; (7) C₁₋₆ alk-C₆₋₁₀ aryl; (8) azido; (9) C₃₋₈ cycloalkyl; (10) C₁₋₆ alk-C₃₋₈ cycloalkyl; (11) halo; (12) C₁₋₁₂ heterocyclyl (e.g., C₁₋₁₂ heteroaryl); (13) (C₁₋₁₂ heterocyclyl)oxy; (14) hydroxy; (15) nitro; (16) C₁₋₂₀ thioalkoxy (e.g., C₁₋₆ thioalkoxy); (17) —(CH₂)_{q}CO₂R^{A′}, where q is an integer from zero to four, and R^{A′} is selected from the group consisting of (a) C₁₋₆ alkyl, (b) C₆₋₁₀ aryl, (c) hydrogen, and (d) C₁₋₆ alk-C₆₋₁₀ aryl; (18) —(CH₂)_{q}CONR^{B′}R^{C′}, where q is an integer from zero to four and where R^{B′} and R^{C′} are independently selected from the group consisting of (a) hydrogen, (b) C₆₋₁₀ alkyl, (c) C₆₋₁₀ aryl, and (d) C₁₋₆ alk-C₆₋₁₀ aryl; (19) —(CH₂)_{q}SO₂R^{D′}, where q is an integer from zero to four and where R^{D′} is selected from the group consisting of (a) C₆₋₁₀ alkyl, (b) C₆₋₁₀ aryl, and (c) C₁₋₆ alk-C₆₋₁₀ aryl; (20) —(CH₂)_{q}SO₂NR^{E′}R^{F′}, where q is an integer from zero to four and where each of R^{E′} and R^{F′} is, independently, selected from the group consisting of (a) hydrogen, (b) C₆₋₁₀ alkyl, (c) C₆₋₁₀ aryl, and (d) C₁₋₆ alk-C₆₋₁₀ aryl; (21) thiol; (22) C₆₋₁₀ aryloxy; (23) C₃₋₈ cycloalkoxy; (24) C₆₋₁₀ aryl-C₁₋₆ alkoxy; (25) C₁₋₆ alk-C₁₋₁₂ heterocyclyl (e.g., C₁₋₆ alk-C₁₋₁₂ heteroaryl); (26) oxo; (27) C₂₋₂₀ alkenyl; and (28) C₂₋₂₀ alkynyl. In some embodiments, each of these groups can be further substituted as described herein. For example, the alkylene group of a C₁-alkaryl or a C₁-alkheterocyclyl can be further substituted with an oxo group to afford the respective aryloyl and (heterocyclyl)oyl substituent group.

[0797] The term “diasteromer” means stereoisomers that are not mirror images of one another and are non-superimposable.

[0798] The term “effective amount” of an agent, as used herein, is that amount sufficient to effect beneficial or desired results, for example, clinical results, and, as such, an “effective amount” depends upon the context in which it is being applied. For example, in the context of administering an agent that treats cancer, an effective amount of an agent is, for example, an amount sufficient to achieve treatment, as defined herein, of cancer, as compared to the response obtained without administration of the agent.

[0799] The term “enantiomer,” as used herein, means each individual optically active form of a compound of the invention, having an optical purity or enantiomeric excess (as determined by methods standard in the art) of at least 80% (i.e., at least 90% of one enantiomer and at most 10% of the other enantiomer), preferably at least 90% and more preferably at least 98%.

[0800] The term “halo,” as used herein, represents a halogen selected from bromine, chlorine, iodine, or fluorine.

[0801] The term “haloalkoxy,” as used herein, represents an alkoxy group, as defined herein, substituted by a halogen group (i.e., F, Cl, Br, or I). A haloalkoxy may be substituted with one, two, three, or, in the case of alkyl groups of two carbons or more, four halogens. Haloalkoxy groups include perfluoroalkoxys (e.g., —OCF₃), —OCHF₂, —OCH₂F, —OCCl₃, —OCH₂CH₂Br, —OCH₂CH(CH₂CH₂Br)CH₃, and —OCHICH₃. In some embodiments, the haloalkoxy group can be further substituted with 1, 2, 3, or 4 substituent groups as described herein for alkyl groups.

[0802] The term “haloalkyl,” as used herein, represents an alkyl group, as defined herein, substituted by a halogen group (i.e., F, Cl, Br, or I). A haloalkyl may be substituted with one, two, three, or, in the case of alkyl groups of two carbons or more, four halogens. Haloalkyl groups include perfluoroalkyls (e.g., —CF₃), —CHF₂, —CH₂F, —CCl₃, —CH₂CH₂Br, —CH₂CH(CH₂CH₂Br)CH₃, and —CHICH₃. In some embodiments, the haloalkyl group can be further substituted with 1, 2, 3, or 4 substituent groups as described herein for alkyl groups.

[0803] The term “heteroalkylene,” as used herein, refers to an alkylene group, as defined herein, in which one or two of the constituent carbon atoms have each been replaced by nitrogen, oxygen, or sulfur. In some embodiments, the heteroalkylene group can be further substituted with 1, 2, 3, or 4 substituent groups as described herein for alkylene groups.

[0804] The term “heteroaryl,” as used herein, represents that subset of heterocyclyls, as defined herein, which are aromatic: i.e., they contain 4n+2 pi electrons within the mono- or multicyclic ring system. Exemplary unsubstituted heteroaryl groups are of 1 to 12 (e.g., 1 to 11, 1 to 10, 1 to 9, 2 to 12, 2 to 11, 2 to 10, or 2 to 9) carbons. In some embodiment, the heteroaryl is substituted with 1, 2, 3, or 4 substituents groups as defined for a heterocyclyl group.

[0805] The term “heterocyclyl,” as used herein represents a 5-, 6- or 7-membered ring, unless otherwise specified, containing one, two, three, or four heteroatoms independently selected from the group consisting of nitrogen, oxygen, and sulfur. The 5-membered ring has zero to two double bonds, and the 6- and 7-membered rings have zero to three double bonds. Exemplary unsubstituted heterocyclyl groups are of 1 to 12 (e.g., 1 to 11, 1 to 10, 1 to 9, 2 to 12, 2 to 11, 2 to 10, or 2 to 9) carbons. The term “heterocyclyl” also represents a heterocyclic compound having a bridged multicyclic structure in which one or more carbons and/or heteroatoms bridges two non-adjacent members of a monocyclic ring, e.g., a quinuclidinyl group. The term “heterocyclyl” includes bicyclic, tricyclic, and tetracyclic groups in which any of the above heterocyclic rings is fused to one, two, or three carbocyclic rings, e.g., an aryl ring, a cyclohexane ring, a cyclohexene ring, a cyclopentane ring, a cyclopentene ring, or another monocyclic heterocyclic ring, such as indolyl, quinolyl, isoquinolyl, tetrahydroquinolyl, benzofuryl, benzothienyl and the like. Examples of fused heterocyclyls include tropanes and 1,2,3,5,8,8a-hexahydroindolizine. Heterocyclics include pyrrolyl, pyrrolinyl, pyrrolidinyl, pyrazolyl, pyrazolinyl, pyrazolidinyl, imidazolyl, imidazolinyl, imidazolidinyl, pyridyl, piperidinyl, homopiperidinyl, pyrazinyl, piperazinyl, pyrimidinyl, pyridazinyl, oxazolyl, oxazolidinyl, isoxazolyl, isoxazolidiniyl, morpholinyl, thiomorpholinyl, thiazolyl, thiazolidinyl, isothiazolyl, isothiazolidinyl, indolyl, indazolyl, quinolyl, isoquinolyl, quinoxalinyl, dihydroquinoxalinyl, quinazolinyl, cinnolinyl, phthalazinyl, benzimidazolyl, benzothiazolyl, benzoxazolyl, benzothiadiazolyl, furyl, thienyl, thiazolidinyl, isothiazolyl, triazolyl, tetrazolyl, oxadiazolyl (e.g., 1,2,3-oxadiazolyl), purinyl, thiadiazolyl (e.g., 1,2,3-thiadiazolyl), tetrahydrofuranyl, dihydrofuranyl, tetrahydrothienyl, dihydrothienyl, dihydroindolyl, dihydroquinolyl, tetrahydroquinolyl, tetrahydroisoquinolyl, dihydroisoquinolyl, pyranyl, dihydropyranyl, dithiazolyl, benzofuranyl, isobenzofuranyl, benzothienyl, and the like, including dihydro and tetrahydro forms thereof, where one or more double bonds are reduced and replaced with hydrogens. Still other exemplary heterocyclyls include: 2,3,4,5-tetrahydro-2-oxo-oxazolyl; 2,3-dihydro-2-oxo-1H-imidazolyl; 2,3,4,5-tetrahydro-5-oxo-1H-pyrazolyl (e.g., 2,3,4,5-tetrahydro-2-phenyl-5-oxo-1H-pyrazolyl); 2,3,4,5-tetrahydro-2,4-dioxo-1H-imidazolyl (e.g., 2,3,4,5-tetrahydro-2,4-dioxo-5-methyl-5-phenyl-1H-imidazolyl); 2,3-dihydro-2-thioxo-1,3,4-oxadiazolyl (e.g., 2,3-dihydro-2-thioxo-5-phenyl-1,3,4-oxadiazolyl); 4,5-dihydro-5-oxo-1H-triazolyl (e.g., 4,5-dihydro-3-methyl-4-amino 5-oxo-1H-triazolyl); 1,2,3,4-tetrahydro-2,4-dioxopyridinyl (e.g., 1,2,3,4-tetrahydro-2,4-dioxo-3,3-diethylpyridinyl); 2,6-dioxo-piperidinyl (e.g., 2,6-dioxo-3-ethyl-3-phenylpiperidinyl); 1,6-dihydro-6-oxopyridiminyl; 1,6-dihydro-4-oxopyrimidinyl (e.g., 2-(methylthio)-1,6-dihydro-4-oxo-5-methylpyrimidin-1-yl); 1,2,3,4-tetrahydro-2,4-dioxopyrimidinyl (e.g., 1,2,3,4-tetrahydro-2,4-dioxo-3-ethylpyrimidinyl); 1,6-dihydro-6-oxo-pyridazinyl (e.g., 1,6-dihydro-6-oxo-3-ethylpyridazinyl); 1,6-dihydro-6-oxo-1,2,4-triazinyl (e.g., 1,6-dihydro-5-isopropyl-6-oxo-1,2,4-triazinyl); 2,3-dihydro-2-oxo-1H-indolyl (e.g., 3,3-dimethyl-2,3-dihydro-2-oxo-1H-indolyl and 2,3-dihydro-2-oxo-3,3′-spiropropane-1H-indol-1-yl); 1,3-dihydro-1-oxo-2H-iso-indolyl; 1,3-dihydro-1,3-dioxo-2H-iso-indolyl; 1H-benzopyrazolyl (e.g., 1-(ethoxycarbonyl)-1H-benzopyrazolyl); 2,3-dihydro-2-oxo-1H-benzimidazolyl (e.g., 3-ethyl-2,3-dihydro-2-oxo-1H-benzimidazolyl); 2,3-dihydro-2-oxo-benzoxazolyl (e.g., 5-chloro-2,3-dihydro-2-oxo-benzoxazolyl); 2,3-dihydro-2-oxo-benzoxazolyl; 2-oxo-2H-benzopyranyl; 1,4-benzodioxanyl; 1,3-benzodioxanyl; 2,3-dihydro-3-oxo, 4H-1,3-benzothiazinyl; 3,4-dihydro-4-oxo-3H-quinazolinyl (e.g., 2-methyl-3,4-dihydro-4-oxo-3H-quinazolinyl); 1,2,3,4-tetrahydro-2,4-dioxo-3H-quinazolyl (e.g., 1-ethyl-1,2,3,4-tetrahydro-2,4-dioxo-3H-quinazolyl); 1,2,3,6-tetrahydro-2,6-dioxo-7H-purinyl (e.g., 1,2,3,6-tetrahydro-1,3-dimethyl-2,6-dioxo-7H-purinyl); 1,2,3,6-tetrahydro-2,6-dioxo-1H-purinyl (e.g., 1,2,3,6-tetrahydro-3,7-dimethyl-2,6-dioxo-1H-purinyl); 2-oxobenz[c,d]indolyl; 1,1-dioxo-2H-naphth[1,8-c,d]isothiazolyl; and 1,8-naphthylenedicarboxamido. Additional heterocyclics include 3,3a,4,5,6,6a-hexahydro-pyrrolo[3,4-b]pyrrol-(2H)-yl, and 2,5-diazabicyclo[2.2.1]heptan-2-yl, homopiperazinyl (or diazepanyl), tetrahydropyranyl, dithiazolyl, benzofuranyl, benzothienyl, oxepanyl, thiepanyl, azocanyl, oxecanyl, and thiocanyl. Heterocyclic groups also include groups of the formula

[chemical structure]

where

[0806] E′ is selected from the group consisting of —N— and —CH—; F′ is selected from the group consisting of —N═CH—, —NH—CH₂—, —NH—C(O)—, —NH—, —CH═N—, —CH₂—NH—, —C(O)—NH—, —CH═CH—, —CH₂—, —CH₂CH₂—, —CH₂O—, —OCH₂—, —O—, and —S—; and G′ is selected from the group consisting of —CH— and —N—. Any of the heterocyclyl groups mentioned herein may be optionally substituted with one, two, three, four or five substituents independently selected from the group consisting of: (1) C₁₋₇ acyl (e.g., carboxyaldehyde); (2) C₁₋₂₀ alkyl (e.g., C₁₋₆ alkyl, C₁₋₆ alkoxy-C₁₋₆ alkyl, C₁₋₆ alkylsulfinyl-C₁₋₆ alkyl, amino-C₁₋₆ alkyl, azido-C₁₋₆ alkyl, (carboxyaldehyde)-C₁₋₆ alkyl, halo-C₁₋₆ alkyl (e.g., perfluoroalkyl), hydroxy-C₁₋₆ alkyl, nitro-C₁₋₆ alkyl, or C₁₋₆ thioalkoxy-C₁₋₆ alkyl); (3) C₁₋₂₀ alkoxy (e.g., C₁₋₆ alkoxy, such as perfluoroalkoxy); (4) C₁₋₆ alkylsulfinyl; (5) C₆₋₁₀ aryl; (6) amino; (7) C₁₋₆ alk-C₆₋₁₀ aryl; (8) azido; (9) C₃₋₈ cycloalkyl; (10) C₁₋₆ alk-C₃₋₈ cycloalkyl; (11) halo; (12) C₁₋₁₂ heterocyclyl (e.g., C₂₋₁₂ heteroaryl); (13) (C₁₋₁₂ heterocyclyl)oxy; (14) hydroxy; (15) nitro; (16) C₁₋₂₀ thioalkoxy (e.g., C₁₋₆ thioalkoxy); (17) —(CH₂)_{q}CO₂R^{A′}, where q is an integer from zero to four, and R^{A′} is selected from the group consisting of (a) C₁₋₆ alkyl, (b) C₆₋₁₀ aryl, (c) hydrogen, and (d) C₁₋₆ alk-C₆₋₁₀ aryl; (18) —(CH₂)_{q}CONR^{B′}R^{C′}, where q is an integer from zero to four and where R^{B′} and R^{C′} are independently selected from the group consisting of (a) hydrogen, (b) C₁₋₆ alkyl, (c) C₆₋₁₀ aryl, and (d) C₁₋₆ alk-C₆₋₁₀ aryl; (19) —(CH₂)_{q}SO₂R^{D′}, where q is an integer from zero to four and where R^{D′} is selected from the group consisting of (a) C₁₋₆ alkyl, (b) C₆₋₁₀ aryl, and (c) C₁₋₆ alk-C₆₋₁₀ aryl; (20) —(CH₂)_{q}SO₂NR^{E′}R^{F′}, where q is an integer from zero to four and where each of R^{E′} and R^{F′} is, independently, selected from the group consisting of (a) hydrogen, (b) C₁₋₆ alkyl, (c) C₆₋₁₀ aryl, and (d) C₁₋₆ alk-C₆₋₁₀ aryl; (21) thiol; (22) C₆₋₁₀ aryloxy; (23) C₃₋₈ cycloalkoxy; (24) arylalkoxy; (25) C₁₋₆ alk-C₁₋₁₂ heterocyclyl (e.g., C₁₋₆ alk-C₁₋₁₂ heteroaryl); (26) oxo; (27) (C₁₋₁₂ heterocyclyl)imino; (28) C₂₋₂₀ alkenyl; and (29) C₂₋₂₀ alkynyl. In some embodiments, each of these groups can be further substituted as described herein. For example, the alkylene group of a C₁-alkaryl or a C₁-alkheterocyclyl can be further substituted with an oxo group to afford the respective aryloyl and (heterocyclyl)oyl substituent group.

[0807] The term “(heterocyclyl)imino,” as used herein, represents a heterocyclyl group, as defined herein, attached to the parent molecular group through an imino group. In some embodiments, the heterocyclyl group can be substituted with 1, 2, 3, or 4 substituent groups as defined herein.

[0808] The term “(heterocyclyl)oxy,” as used herein, represents a heterocyclyl group, as defined herein, attached to the parent molecular group through an oxygen atom. In some embodiments, the heterocyclyl group can be substituted with 1, 2, 3, or 4 substituent groups as defined herein.

[0809] The term “(heterocyclyl)oyl,” as used herein, represents a heterocyclyl group, as defined herein, attached to the parent molecular group through a carbonyl group. In some embodiments, the heterocyclyl group can be substituted with 1, 2, 3, or 4 substituent groups as defined herein.

[0810] The term “hydrocarbon,” as used herein, represents a group consisting only of carbon and hydrogen atoms.

[0811] The term “hydroxy,” as used herein, represents an —OH group.

[0812] The term “hydroxyalkenyl,” as used herein, represents an alkenyl group, as defined herein, substituted by one to three hydroxy groups, with the proviso that no more than one hydroxy group may be attached to a single carbon atom of the alkyl group, and is exemplified by dihydroxypropenyl, hydroxyisopentenyl, and the like.

[0813] The term “hydroxyalkyl,” as used herein, represents an alkyl group, as defined herein, substituted by one to three hydroxy groups, with the proviso that no more than one hydroxy group may be attached to a single carbon atom of the alkyl group, and is exemplified by hydroxymethyl, dihydroxypropyl, and the like.

[0814] The term “isomer,” as used herein, means any tautomer, stereoisomer, enantiomer, or diastereomer of any compound of the invention. It is recognized that the compounds of the invention can have one or more chiral centers and/or double bonds and, therefore, exist as stereoisomers, such as double-bond isomers (i.e., geometric E/Z isomers) or diastereomers (e.g., enantiomers (i.e., (+) or (−)) or cis/trans isomers). According to the invention, the chemical structures depicted herein, and therefore the compounds of the invention, encompass all of the corresponding stereoisomers, that is, both the stereomerically pure form (e.g., geometrically pure, enantiomerically pure, or diastereomerically pure) and enantiomeric and stereoisomeric mixtures, e.g., racemates. Enantiomeric and stereoisomeric mixtures of compounds of the invention can typically be resolved into their component enantiomers or stereoisomers by well-known methods, such as chiral-phase gas chromatography, chiral-phase high performance liquid chromatography, crystallizing the compound as a chiral salt complex, or crystallizing the compound in a chiral solvent. Enantiomers and stereoisomers can also be obtained from stereomerically or enantiomerically pure intermediates, reagents, and catalysts by well-known asymmetric synthetic methods.

[0815] The term “N-protected amino,” as used herein, refers to an amino group, as defined herein, to which is attached one or two N-protecting groups, as defined herein.

[0816] The term “N-protecting group,” as used herein, represents those groups intended to protect an amino group against undesirable reactions during synthetic procedures. Commonly used N-protecting groups are disclosed in Greene, “Protective Groups in Organic Synthesis,” 3^{rd} Edition (John Wiley & Sons, New York, 1999), which is incorporated herein by reference. N-protecting groups include acyl, aryloyl, or carbamyl groups such as formyl, acetyl, propionyl, pivaloyl, t-butylacetyl, 2-chloroacetyl, 2-bromoacetyl, trifluoroacetyl, trichloroacetyl, phthalyl, o-nitrophenoxyacetyl, α-chlorobutyryl, benzoyl, 4-chlorobenzoyl, 4-bromobenzoyl, 4-nitrobenzoyl, and chiral auxiliaries such as protected or unprotected D, L or D, L-amino acids such as alanine, leucine, phenylalanine, and the like; sulfonyl-containing groups such as benzenesulfonyl, p-toluenesulfonyl, and the like; carbamate forming groups such as benzyloxycarbonyl, p-chlorobenzyloxycarbonyl, p-methoxybenzyloxycarbonyl, p-nitrobenzyloxycarbonyl, 2-nitrobenzyloxycarbonyl, p-bromobenzyloxycarbonyl, 3,4-dimethoxybenzyloxycarbonyl, 3,5-dimethoxybenzyloxycarbonyl, 2,4-dimethoxybenzyloxycarbonyl, 4-methoxybenzyloxycarbonyl, 2-nitro-4,5-dimethoxybenzyloxycarbonyl, 3,4,5-trimethoxybenzyloxycarbonyl, 1-(p-biphenylyl)-1-methylethoxycarbonyl, α,α-dimethyl-3,5-dimethoxybenzyloxycarbonyl, benzhydryloxy carbonyl, t-butyloxycarbonyl, diisopropylmethoxycarbonyl, isopropyloxycarbonyl, ethoxycarbonyl, methoxycarbonyl, allyloxycarbonyl, 2,2,2,-trichloroethoxycarbonyl, phenoxycarbonyl, 4-nitrophenoxy carbonyl, fluorenyl-9-methoxycarbonyl, cyclopentyloxycarbonyl, adamantyloxycarbonyl, cyclohexyloxycarbonyl, phenylthiocarbonyl, and the like, alkaryl groups such as benzyl, triphenylmethyl, benzyloxymethyl, and the like and silyl groups, such as trimethylsilyl, and the like. Preferred N-protecting groups are formyl, acetyl, benzoyl, pivaloyl, t-butylacetyl, alanyl, phenylsulfonyl, benzyl, t-butyloxycarbonyl (Boc), and benzyloxycarbonyl (Cbz).

[0817] The term “nitro,” as used herein, represents an —NO₂ group.

[0818] The term “oxo” as used herein, represents ═O.

[0819] The term “perfluoroalkyl,” as used herein, represents an alkyl group, as defined herein, where each hydrogen radical bound to the alkyl group has been replaced by a fluoride radical. Perfluoroalkyl groups are exemplified by trifluoromethyl, pentafluoroethyl, and the like.

[0820] The term “perfluoroalkoxy,” as used herein, represents an alkoxy group, as defined herein, where each hydrogen radical bound to the alkoxy group has been replaced by a fluoride radical. Perfluoroalkoxy groups are exemplified by trifluoromethoxy, pentafluoroethoxy, and the like.

[0821] The term “spirocyclyl,” as used herein, represents a C₂₋₇ alkylene diradical, both ends of which are bonded to the same carbon atom of the parent group to form a spirocyclic group, and also a C₁₋₆ heteroalkylene diradical, both ends of which are bonded to the same atom. The heteroalkylene radical forming the spirocyclyl group can containing one, two, three, or four heteroatoms independently selected from the group consisting of nitrogen, oxygen, and sulfur. In some embodiments, the spirocyclyl group includes one to seven carbons, excluding the carbon atom to which the diradical is attached. The spirocyclyl groups of the invention may be optionally substituted with 1, 2, 3, or 4 substituents provided herein as optional substituents for cycloalkyl and/or heterocyclyl groups.

[0822] The term “stereoisomer,” as used herein, refers to all possible different isomeric as well as conformational forms which a compound may possess (e.g., a compound of any formula described herein), in particular all possible stereochemically and conformationally isomeric forms, all diastereomers, enantiomers and/or conformers of the basic molecular structure. Some compounds of the present invention may exist in different tautomeric forms, all of the latter being included within the scope of the present invention.

[0823] The term “sulfoalkyl,” as used herein, represents an alkyl group, as defined herein, substituted by a sulfo group of —SO₃H. In some embodiments, the alkyl group can be further substituted with 1, 2, 3, or 4 substituent groups as described herein.

[0824] The term “sulfonyl,” as used herein, represents an —S(O)₂— group.

[0825] The term “thioalkaryl,” as used herein, represents a chemical substituent of formula —SR, where R is an alkaryl group. In some embodiments, the alkaryl group can be further substituted with 1, 2, 3, or 4 substituent groups as described herein.

[0826] The term “thioalkheterocyclyl,” as used herein, represents a chemical substituent of formula —SR, where R is an alkheterocyclyl group. In some embodiments, the alkheterocyclyl group can be further substituted with 1, 2, 3, or 4 substituent groups as described herein.

[0827] The term “thioalkoxy,” as used herein, represents a chemical substituent of formula —SR, where R is an alkyl group, as defined herein. In some embodiments, the alkyl group can be further substituted with 1, 2, 3, or 4 substituent groups as described herein.

[0828] The term “thiol” represents an —SH group.

[0829] Compound: As used herein, the term “compound,” is meant to include all stereoisomers, geometric isomers, tautomers, and isotopes of the structures depicted.

[0830] The compounds described herein can be asymmetric (e.g., having one or more stereocenters). All stereoisomers, such as enantiomers and diastereomers, are intended unless otherwise indicated. Compounds of the present disclosure that contain asymmetrically substituted carbon atoms can be isolated in optically active or racemic forms. Methods on how to prepare optically active forms from optically active starting materials are known in the art, such as by resolution of racemic mixtures or by stereoselective synthesis. Many geometric isomers of olefins, C═N double bonds, and the like can also be present in the compounds described herein, and all such stable isomers are contemplated in the present disclosure. Cis and trans geometric isomers of the compounds of the present disclosure are described and may be isolated as a mixture of isomers or as separated isomeric forms.

[0831] Compounds of the present disclosure also include tautomeric forms. Tautomeric forms result from the swapping of a single bond with an adjacent double bond and the concomitant migration of a proton. Tautomeric forms include prototropic tautomers which are isomeric protonation states having the same empirical formula and total charge. Examples prototropic tautomers include ketone—enol pairs, amide—imidic acid pairs, lactam—lactim pairs, amide—imidic acid pairs, enamine—imine pairs, and annular forms where a proton can occupy two or more positions of a heterocyclic system, such as, 1H- and 3H-imidazole, 1H-, 2H- and 4H-1,2,4-triazole, 1H- and 2H-isoindole, and 1H- and 2H-pyrazole. Tautomeric forms can be in equilibrium or sterically locked into one form by appropriate substitution.

[0832] Compounds of the present disclosure also include all of the isotopes of the atoms occurring in the intermediate or final compounds. “Isotopes” refers to atoms having the same atomic number but different mass numbers resulting from a different number of neutrons in the nuclei. For example, isotopes of hydrogen include tritium and deuterium.

[0833] The compounds and salts of the present disclosure can be prepared in combination with solvent or water molecules to form solvates and hydrates by routine methods.

[0834] Conserved: As used herein, the term “conserved” refers to nucleotides or amino acid residues of a polynucleotide sequence or polypeptide sequence, respectively, that are those that occur unaltered in the same position of two or more sequences being compared. Nucleotides or amino acids that are relatively conserved are those that are conserved amongst more related sequences than nucleotides or amino acids appearing elsewhere in the sequences.

[0835] In some embodiments, two or more sequences are said to be “completely conserved” if they are 100% identical to one another. In some embodiments, two or more sequences are said to be “highly conserved” if they are at least 70% identical, at least 80% identical, at least 90% identical, or at least 95% identical to one another. In some embodiments, two or more sequences are said to be “highly conserved” if they are about 70% identical, about 80% identical, about 90% identical, about 95%, about 98%, or about 99% identical to one another. In some embodiments, two or more sequences are said to be “conserved” if they are at least 30% identical, at least 40% identical, at least 50% identical, at least 60% identical, at least 70% identical, at least 80% identical, at least 90% identical, or at least 95% identical to one another. In some embodiments, two or more sequences are said to be “conserved” if they are about 30% identical, about 40% identical, about 50% identical, about 60% identical, about 70% identical, about 80% identical, about 90% identical, about 95% identical, about 98% identical, or about 99% identical to one another. Conservation of sequence may apply to the entire length of an oligonucleotide or polypeptide or may apply to a portion, region or feature thereof

[0836] Controlled Release: As used herein, the term “controlled release” refers to a pharmaceutical composition or compound release profile that conforms to a particular pattern of release to effect a therapeutic outcome.

[0837] Cyclic or Cyclized: As used herein, the term “cyclic” refers to the presence of a continuous loop. Cyclic molecules need not be circular, only joined to form an unbroken chain of subunits. Cyclic molecules such as the engineered RNA or mRNA of the present invention may be single units or multimers or comprise one or more components of a complex or higher order structure.

[0838] Cytostatic: As used herein, “cytostatic” refers to inhibiting, reducing, suppressing the growth, division, or multiplication of a cell (e.g., a mammalian cell (e.g., a human cell)), bacterium, virus, fungus, protozoan, parasite, prion, or a combination thereof.

[0839] Cytotoxic: As used herein, “cytotoxic” refers to killing or causing injurious, toxic, or deadly effect on a cell (e.g., a mammalian cell (e.g., a human cell)), bacterium, virus, fungus, protozoan, parasite, prion, or a combination thereof.

[0840] Delivery: As used herein, “delivery” refers to the act or manner of delivering a compound, substance, entity, moiety, cargo or payload.

[0841] Delivery Agent: As used herein, “delivery agent” refers to any substance which facilitates, at least in part, the in vivo delivery of a nucleic acid molecule to targeted cells.

[0842] Destabilized: As used herein, the term “destable,” “destabilize,” or “destabilizing region” means a region or molecule that is less stable than a starting, wild-type or native form of the same region or molecule.

[0843] Detectable label: As used herein, “detectable label” refers to one or more markers, signals, or moieties which are attached, incorporated or associated with another entity that is readily detected by methods known in the art including radiography, fluorescence, chemiluminescence, enzymatic activity, absorbance and the like. Detectable labels include radioisotopes, fluorophores, chromophores, enzymes, dyes, metal ions, ligands such as biotin, avidin, streptavidin and haptens, quantum dots, and the like. Detectable labels may be located at any position in the peptides or proteins disclosed herein. They may be within the amino acids, the peptides, or proteins, or located at the N- or C-termini.

[0844] Digest: As used herein, the term “digest” means to break apart into smaller pieces or components. When referring to polypeptides or proteins, digestion results in the production of peptides.

[0845] Distal: As used herein, the term “distal” means situated away from the center or away from a point or region of interest.

[0846] Dose splitting factor (DSF)-ratio of PUD of dose split treatment divided by PUD of total daily dose or single unit dose. The value is derived from comparison of dosing regimens groups.

[0847] Encapsulate: As used herein, the term “encapsulate” means to enclose, surround or encase.

[0848] Engineered: As used herein, embodiments of the invention are “engineered” when they are designed to have a feature or property, whether structural or chemical, that varies from a starting point, wild type or native molecule.

[0849] Exosome: As used herein, “exosome” is a vesicle secreted by mammalian cells.

[0850] Expression: As used herein, “expression” of a nucleic acid sequence refers to one or more of the following events: (1) production of an RNA template from a DNA sequence (e.g., by transcription); (2) processing of an RNA transcript (e.g., by splicing, editing, 5′ cap formation, and/or 3′ end processing); (3) translation of an RNA into a polypeptide or protein; and (4) post-translational modification of a polypeptide or protein.

[0851] Feature: As used herein, a “feature” refers to a characteristic, a property, or a distinctive element.

[0852] Formulation: As used herein, a “formulation” includes at least a modified nucleic acid molecule or mmRNA and a delivery agent.

[0853] Fragment: A “fragment,” as used herein, refers to a portion. For example, fragments of proteins may comprise polypeptides obtained by digesting full-length protein isolated from cultured cells.

[0854] Functional: As used herein, a “functional” biological molecule is a biological molecule in a form in which it exhibits a property and/or activity by which it is characterized.

[0855] Homology: As used herein, the term “homology” refers to the overall relatedness between polymeric molecules, e.g. between nucleic acid molecules (e.g. DNA molecules and/or RNA molecules) and/or between polypeptide molecules. In some embodiments, polymeric molecules are considered to be “homologous” to one another if their sequences are at least 25%, 30%, 35%, 40%, 45%, 50%, 55%, 60%, 65%, 70%, 75%, 80%, 85%, 90%, 95%, or 99% identical or similar. The term “homologous” necessarily refers to a comparison between at least two sequences (polynucleotide or polypeptide sequences). In accordance with the invention, two polynucleotide sequences are considered to be homologous if the polypeptides they encode are at least about 50%, 60%, 70%, 80%, 90%, 95%, or even 99% for at least one stretch of at least about 20 amino acids. In some embodiments, homologous polynucleotide sequences are characterized by the ability to encode a stretch of at least 4-5 uniquely specified amino acids. For polynucleotide sequences less than 60 nucleotides in length, homology is determined by the ability to encode a stretch of at least 4-5 uniquely specified amino acids. In accordance with the invention, two protein sequences are considered to be homologous if the proteins are at least about 50%, 60%, 70%, 80%, or 90% identical for at least one stretch of at least about 20 amino acids.

[0856] Identity: As used herein, the term “identity” refers to the overall relatedness between polymeric molecules, e.g., between oligonucleotide molecules (e.g. DNA molecules and/or RNA molecules) and/or between polypeptide molecules. Calculation of the percent identity of two polynucleotide sequences, for example, can be performed by aligning the two sequences for optimal comparison purposes (e.g., gaps can be introduced in one or both of a first and a second nucleic acid sequences for optimal alignment and non-identical sequences can be disregarded for comparison purposes). In certain embodiments, the length of a sequence aligned for comparison purposes is at least 30%, at least 40%, at least 50%, at least 60%, at least 70%, at least 80%, at least 90%, at least 95%, or 100% of the length of the reference sequence. The nucleotides at corresponding nucleotide positions are then compared. When a position in the first sequence is occupied by the same nucleotide as the corresponding position in the second sequence, then the molecules are identical at that position. The percent identity between the two sequences is a function of the number of identical positions shared by the sequences, taking into account the number of gaps, and the length of each gap, which needs to be introduced for optimal alignment of the two sequences. The comparison of sequences and determination of percent identity between two sequences can be accomplished using a mathematical algorithm. For example, the percent identity between two nucleotide sequences can be determined using methods such as those described in Computational Molecular Biology, Lesk, A. M., ed., Oxford University Press, New York, 1988; Biocomputing: Informatics and Genome Projects, Smith, D. W., ed., Academic Press, New York, 1993; Sequence Analysis in Molecular Biology, von Heinje, G., Academic Press, 1987; Computer Analysis of Sequence Data, Part I, Griffin, A. M., and Griffin, H. G., eds., Humana Press, New Jersey, 1994; and Sequence Analysis Primer, Gribskov, M. and Devereux, J., eds., M Stockton Press, New York, 1991; each of which is incorporated herein by reference. For example, the percent identity between two nucleotide sequences can be determined using the algorithm of Meyers and Miller (CABIOS, 1989, 4:11-17; herein incorporated by reference in its entirety), which has been incorporated into the ALIGN program (version 2.0) using a PAM120 weight residue table, a gap length penalty of 12 and a gap penalty of 4. The percent identity between two nucleotide sequences can, alternatively, be determined using the GAP program in the GCG software package using an NWSgapdna.CMP matrix. Methods commonly employed to determine percent identity between sequences include, but are not limited to those disclosed in Carillo, H., and Lipman, D., SIAM J Applied Math., 48:1073 (1988); incorporated herein by reference in its entirety.

[0857] Techniques for determining identity are codified in publicly available computer programs. Exemplary computer software to determine homology between two sequences include, but are not limited to, GCG program package, Devereux, J., et al., Nucleic Acids Research, 12(1), 387 (1984); herein incorporated by reference in its entirety, BLASTP, BLASTN, and FASTA Atschul, S. F. et al., J. Molec. Biol., 215, 403 (1990); herein incorporated by reference in its entirety.

[0858] Inhibit expression of a gene: As used herein, the phrase “inhibit expression of a gene” means to cause a reduction in the amount of an expression product of the gene. The expression product can be an RNA transcribed from the gene (e.g., an mRNA) or a polypeptide translated from an mRNA transcribed from the gene. Typically a reduction in the level of an mRNA results in a reduction in the level of a polypeptide translated therefrom. The level of expression may be determined using standard techniques for measuring mRNA or protein.

[0859] In vitro: As used herein, the term “in vitro” refers to events that occur in an artificial environment, e.g., in a test tube or reaction vessel, in cell culture, in a Petri dish, etc., rather than within an organism (e.g., animal, plant, or microbe).

[0860] In vivo: As used herein, the term “in vivo” refers to events that occur within an organism (e.g., animal, plant, or microbe or cell or tissue thereof).

[0861] Isolated: As used herein, the term “isolated” refers to a substance or entity that has been separated from at least some of the components with which it was associated (whether in nature or in an experimental setting). Isolated substances may have varying levels of purity in reference to the substances from which they have been associated. Isolated substances and/or entities may be separated from at least about 10%, about 20%, about 30%, about 40%, about 50%, about 60%, about 70%, about 80%, about 90%, or more of the other components with which they were initially associated. In some embodiments, isolated agents are more than about 80%, about 85%, about 90%, about 91%, about 92%, about 93%, about 94%, about 95%, about 96%, about 97%, about 98%, about 99%, or more than about 99% pure. As used herein, a substance is “pure” if it is substantially free of other components. Substantially isolated: By “substantially isolated” is meant that the compound is substantially separated from the environment in which it was formed or detected. Partial separation can include, for example, a composition enriched in the compound of the present disclosure. Substantial separation can include compositions containing at least about 50%, at least about 60%, at least about 70%, at least about 80%, at least about 90%, at least about 95%, at least about 97%, or at least about 99% by weight of the compound of the present disclosure, or salt thereof. Methods for isolating compounds and their salts are routine in the art.

[0862] Linker: As used herein, a linker refers to a group of atoms, e.g., 10-1,000 atoms, and can be comprised of the atoms or groups such as, but not limited to, carbon, amino, alkylamino, oxygen, sulfur, sulfoxide, sulfonyl, carbonyl, and imine. The linker can be attached to a modified nucleoside or nucleotide on the nucleobase or sugar moiety at a first end, and to a payload, e.g., a detectable or therapeutic agent, at a second end. The linker may be of sufficient length as to not interfere with incorporation into a nucleic acid sequence. The linker can be used for any useful purpose, such as to form mmRNA multimers (e.g., through linkage of two or more modified nucleic acid molecules or mmRNA molecules) or mmRNA conjugates, as well as to administer a payload, as described herein. Examples of chemical groups that can be incorporated into the linker include, but are not limited to, alkyl, alkenyl, alkynyl, amido, amino, ether, thioether, ester, alkylene, heteroalkylene, aryl, or heterocyclyl, each of which can be optionally substituted, as described herein. Examples of linkers include, but are not limited to, unsaturated alkanes, polyethylene glycols (e.g., ethylene or propylene glycol monomeric units, e.g., diethylene glycol, dipropylene glycol, triethylene glycol, tripropylene glycol, tetraethylene glycol, or tetraethylene glycol), and dextran polymers and derivatives thereof. Other examples include, but are not limited to, cleavable moieties within the linker, such as, for example, a disulfide bond (—S—S—) or an azo bond (—N═N—), which can be cleaved using a reducing agent or photolysis. Non-limiting examples of a selectively cleavable bond include an amido bond can be cleaved for example by the use of tris(2-carboxyethyl)phosphine (TCEP), or other reducing agents, and/or photolysis, as well as an ester bond can be cleaved for example by acidic or basic hydrolysis.

[0863] MicroRNA (miRNA) binding site: As used herein, a microRNA (miRNA) binding site represents a nucleotide location or region of a nucleic acid transcript to which at least the “seed” region of a miRNA binds.

[0864] Modified: As used herein “modified” refers to a changed state or structure of a molecule of the invention. Molecules may be modified in many ways including chemically, structurally, and functionally. In one embodiment, the mRNA molecules of the present invention are modified by the introduction of non-natural nucleosides and/or nucleotides.

[0865] Mucus: As used herein, “mucus” refers to a natural substance that is viscous and comprises mucin glycoproteins.

[0866] Naturally occurring: As used herein, “naturally occurring” means existing in nature without artificial aid.

[0867] Non-human vertebrate: As used herein, a “non human vertebrate” includes all vertebrates except Homo sapiens, including wild and domesticated species. Examples of non-human vertebrates include, but are not limited to, mammals, such as alpaca, banteng, bison, camel, cat, cattle, deer, dog, donkey, gayal, goat, guinea pig, horse, llama, mule, pig, rabbit, reindeer, sheep water buffalo, and yak.

[0868] Off-target: As used herein, “off target” refers to any unintended effect on any one or more target, gene, or cellular transcript.

[0869] Open reading frame: As used herein, “open reading frame” or “ORF” refers to a sequence which does not contain a stop codon in a given reading frame.

[0870] Operably linked: As used herein, the phrase “operably linked” refers to a functional connection between two or more molecules, constructs, transcripts, entities, moieties or the like.

[0871] Paratope: As used herein, a “paratope” refers to the antigen-binding site of an antibody.

[0872] Patient: As used herein, “patient” refers to a subject who may seek or be in need of treatment, requires treatment, is receiving treatment, will receive treatment, or a subject who is under care by a trained professional for a particular disease or condition.

[0873] Peptide: As used herein, “peptide” is less than or equal to 50 amino acids long, e.g., about 5, 10, 15, 20, 25, 30, 35, 40, 45, or 50 amino acids long.

[0874] Pharmaceutically acceptable: The phrase “pharmaceutically acceptable” is employed herein to refer to those compounds, materials, compositions, and/or dosage forms which are, within the scope of sound medical judgment, suitable for use in contact with the tissues of human beings and animals without excessive toxicity, irritation, allergic response, or other problem or complication, commensurate with a reasonable benefit/risk ratio.

[0875] Pharmaceutically acceptable excipients: The phrase “pharmaceutically acceptable excipient,” as used herein, refers any ingredient other than the compounds described herein (for example, a vehicle capable of suspending or dissolving the active compound) and having the properties of being substantially nontoxic and non-inflammatory in a patient. Excipients may include, for example: antiadherents, antioxidants, binders, coatings, compression aids, disintegrants, dyes (colors), emollients, emulsifiers, fillers (diluents), film formers or coatings, flavors, fragrances, glidants (flow enhancers), lubricants, preservatives, printing inks, sorbents, suspensing or dispersing agents, sweeteners, and waters of hydration. Exemplary excipients include, but are not limited to: butylated hydroxytoluene (BHT), calcium carbonate, calcium phosphate (dibasic), calcium stearate, croscarmellose, crosslinked polyvinyl pyrrolidone, citric acid, crospovidone, cysteine, ethylcellulose, gelatin, hydroxypropyl cellulose, hydroxypropyl methylcellulose, lactose, magnesium stearate, maltitol, mannitol, methionine, methylcellulose, methyl paraben, microcrystalline cellulose, polyethylene glycol, polyvinyl pyrrolidone, povidone, pregelatinized starch, propyl paraben, retinyl palmitate, shellac, silicon dioxide, sodium carboxymethyl cellulose, sodium citrate, sodium starch glycolate, sorbitol, starch (corn), stearic acid, sucrose, talc, titanium dioxide, vitamin A, vitamin E, vitamin C, and xylitol.

[0876] Pharmaceutically acceptable salts: The present disclosure also includes pharmaceutically acceptable salts of the compounds described herein. As used herein, “pharmaceutically acceptable salts” refers to derivatives of the disclosed compounds wherein the parent compound is modified by converting an existing acid or base moiety to its salt form (e.g., by reacting the free base group with a suitable organic acid). Examples of pharmaceutically acceptable salts include, but are not limited to, mineral or organic acid salts of basic residues such as amines; alkali or organic salts of acidic residues such as carboxylic acids; and the like. Representative acid addition salts include acetate, adipate, alginate, ascorbate, aspartate, benzenesulfonate, benzoate, bisulfate, borate, butyrate, camphorate, camphorsulfonate, citrate, cyclopentanepropionate, digluconate, dodecylsulfate, ethanesulfonate, fumarate, glucoheptonate, glycerophosphate, hemisulfate, heptonate, hexanoate, hydrobromide, hydrochloride, hydroiodide, 2-hydroxy-ethanesulfonate, lactobionate, lactate, laurate, lauryl sulfate, malate, maleate, malonate, methanesulfonate, 2-naphthalenesulfonate, nicotinate, nitrate, oleate, oxalate, palmitate, pamoate, pectinate, persulfate, 3-phenylpropionate, phosphate, picrate, pivalate, propionate, stearate, succinate, sulfate, tartrate, thiocyanate, toluenesulfonate, undecanoate, valerate salts, and the like. Representative alkali or alkaline earth metal salts include sodium, lithium, potassium, calcium, magnesium, and the like, as well as nontoxic ammonium, quaternary ammonium, and amine cations, including, but not limited to ammonium, tetramethylammonium, tetraethylammonium, methylamine, dimethylamine, trimethylamine, triethylamine, ethylamine, and the like. The pharmaceutically acceptable salts of the present disclosure include the conventional non-toxic salts of the parent compound formed, for example, from non-toxic inorganic or organic acids. The pharmaceutically acceptable salts of the present disclosure can be synthesized from the parent compound which contains a basic or acidic moiety by conventional chemical methods. Generally, such salts can be prepared by reacting the free acid or base forms of these compounds with a stoichiometric amount of the appropriate base or acid in water or in an organic solvent, or in a mixture of the two; generally, nonaqueous media like ether, ethyl acetate, ethanol, isopropanol, or acetonitrile are preferred. Lists of suitable salts are found in Remington's Pharmaceutical Sciences, 17^{th} ed., Mack Publishing Company, Easton, Pa., 1985, p. 1418, Pharmaceutical Salts: Properties, Selection, and Use, P. H. Stahl and C. G. Wermuth (eds.), Wiley-VCH, 2008, and Berge et al., Journal of Pharmaceutical Science, 66, 1-19 (1977), each of which is incorporated herein by reference in its entirety.

[0877] Pharmaceutically acceptable solvate: The term “pharmaceutically acceptable solvate,” as used herein, means a compound of the invention wherein molecules of a suitable solvent are incorporated in the crystal lattice. A suitable solvent is physiologically tolerable at the dosage administered. For example, solvates may be prepared by crystallization, recrystallization, or precipitation from a solution that includes organic solvents, water, or a mixture thereof. Examples of suitable solvents are ethanol, water (for example, mono-, di-, and tri-hydrates), N-methylpyrrolidinone (NMP), dimethyl sulfoxide (DMSO), N,N′-dimethylformamide (DMF), N,N′-dimethylacetamide (DMAC), 1,3-dimethyl-2-imidazolidinone (DMEU), 1,3-dimethyl-3,4,5,6-tetrahydro-2-(1H)-pyrimidinone (DMPU), acetonitrile (ACN), propylene glycol, ethyl acetate, benzyl alcohol, 2-pyrrolidone, benzyl benzoate, and the like. When water is the solvent, the solvate is referred to as a “hydrate.”

[0878] Pharmacokinetic: As used herein, “pharmacokinetic” refers to any one or more properties of a molecule or compound as it relates to the determination of the fate of substances administered to a living organism. Pharmacokinetics is divided into several areas including the extent and rate of absorption, distribution, metabolism and excretion. This is commonly referred to as ADME where: (A) Absorption is the process of a substance entering the blood circulation; (D) Distribution is the dispersion or dissemination of substances throughout the fluids and tissues of the body; (M) Metabolism (or Biotransformation) is the irreversible transformation of parent compounds into daughter metabolites; and (E) Excretion (or Elimination) refers to the elimination of the substances from the body. In rare cases, some drugs irreversibly accumulate in body tissue.

[0879] Pharmacologic effect: As used herein, a “pharmacologic effect” is a measurable biologic phenomenon in an organism or system which occurs after the organism or system has been contacted with or exposed to an exogenous agent. Pharmacologic effects may result in therapeutically effective outcomes such as the treatment, improvement of one or more symptoms, diagnosis, prevention, and delay of onset of disease, disorder, condition or infection. Measurement of such biologic phenomena may be quantitative, qualitative or relative to another biologic phenomenon. Quantitative measurements may be statistically significant. Qualitative measurements may be by degree or kind and may be at least 10%, 20%, 30%, 40%, 50%, 60%, 70%, 80%, 90% or more different. They may be observable as present or absent, better or worse, greater or less. Exogenous agents, when referring to pharmacologic effects are those agents which are, in whole or in part, foreign to the organism or system. For example, modifications to a wild type biomolecule, whether structural or chemical, would produce an exogenous agent. Likewise, incorporation or combination of a wild type molecule into or with a compound, molecule or substance not found naturally in the organism or system would also produce an exogenous agent. The modified mRNA of the present invention, comprise exogenous agents. Examples of pharmacologic effects include, but are not limited to, alteration in cell count such as an increase or decrease in neutrophils, reticulocytes, granulocytes, erythrocytes (red blood cells), megakaryocytes, platelets, monocytes, connective tissue macrophages, epidermal langerhans cells, osteoclasts, dendritic cells, microglial cells, neutrophils, eosinophils, basophils, mast cells, helper T cells, suppressor T cells, cytotoxic T cells, natural killer T cells, B cells, natural killer cells, or reticulocytes. Pharmacologic effects also include alterations in blood chemistry, pH, hemoglobin, hematocrit, changes in levels of enzymes such as, but not limited to, liver enzymes AST and ALT, changes in lipid profiles, electrolytes, metabolic markers, hormones or other marker or profile known to those of skill in the art.

[0880] Physicochemical: As used herein, “physicochemical” means of or relating to a physical and/or chemical property.

[0881] Preventing: As used herein, the term “preventing” refers to partially or completely delaying onset of an infection, disease, disorder and/or condition; partially or completely delaying onset of one or more symptoms, features, or clinical manifestations of a particular infection, disease, disorder, and/or condition; partially or completely delaying onset of one or more symptoms, features, or manifestations of a particular infection, disease, disorder, and/or condition; partially or completely delaying progression from an infection, a particular disease, disorder and/or condition; and/or decreasing the risk of developing pathology associated with the infection, the disease, disorder, and/or condition.

[0882] Prodrug: The present disclosure also includes prodrugs of the compounds described herein. As used herein, “prodrugs” refer to any substance, molecule or entity which is in a form predicate for that substance, molecule or entity to act as a therapeutic upon chemical or physical alteration. Prodrugs may by covalently bonded or sequestested in some way and which release or are converted into the active drug moiety prior to, upon or after administered to a mammalian subject. Prodrugs can be prepared by modifying functional groups present in the compounds in such a way that the modifications are cleaved, either in routine manipulation or in vivo, to the parent compounds. Prodrugs include compounds wherein hydroxyl, amino, sulfhydryl, or carboxyl groups are bonded to any group that, when administered to a mammalian subject, cleaves to form a free hydroxyl, amino, sulfhydryl, or carboxyl group respectively. Preparation and use of prodrugs is discussed in T. Higuchi and V. Stella, “Pro-drugs as Novel Delivery Systems,” Vol. 14 of the A.C.S. Symposium Series, and in Bioreversible Carriers in Drug Design, ed. Edward B. Roche, American Pharmaceutical Association and Pergamon Press, 1987, both of which are hereby incorporated by reference in their entirety.

[0883] Proliferate: As used herein, the term “proliferate” means to grow, expand or increase or cause to grow, expand or increase rapidly. “Proliferative” means having the ability to proliferate. “Anti-proliferative” means having properties counter to or inapposite to proliferative properties.

[0884] Protein of interest: As used herein, the terms “proteins of interest” or “desired proteins” include those provided herein and fragments, mutants, variants, and alterations thereof

[0885] Proximal: As used herein, the term “proximal” means situated nearer to the center or to a point or region of interest.

[0886] Pseudouridine: As used herein, pseudouridine refers to the C-glycoside isomer of the nucleoside uridine. A “pseudouridine analog” is any modification, variant, isoform or derivative of pseudouridine. For example, pseudouridine analogs include but are not limited to 1-carboxymethyl-pseudouridine, 1-propynyl-pseudouridine, 1-taurinomethyl-pseudouridine, 1-taurinomethyl-4-thio-pseudouridine, 1-methyl-pseudouridine (m¹ψ), 1-methyl-4-thio-pseudouridine (m¹s⁴ψ), 4-thio-1-methyl-pseudouridine, 3-methyl-pseudouridine (m³ψ), 2-thio-1-methyl-pseudouridine, 1-methyl-1-deaza-pseudouridine, 2-thio-1-methyl-1-deaza-pseudouridine, dihydropseudouridine, 2-thio-dihydropseudouridine, 2-methoxyuridine, 2-methoxy-4-thio-uridine, 4-methoxy-pseudouridine, 4-methoxy-2-thio-pseudouridine, N1-methyl-pseudouridine, 1-methyl-3-(3-amino-3-carboxypropyl)pseudouridine (acp³ψ), and 2′-O-methyl-pseudouridine (ψm).

[0887] Purified: As used herein, “purify,” “purified,” “purification” means to make substantially pure or clear from unwanted components, material defilement, admixture or imperfection.

[0888] Sample: As used herein, the term “sample” refers to a subset of its tissues, cells or component parts (e.g. body fluids, including but not limited to blood, mucus, lymphatic fluid, synovial fluid, cerebrospinal fluid, saliva, amniotic fluid, amniotic cord blood, urine, vaginal fluid and semen). A sample further may include a homogenate, lysate or extract prepared from a whole organism or a subset of its tissues, cells or component parts, or a fraction or portion thereof, including but not limited to, for example, plasma, serum, spinal fluid, lymph fluid, the external sections of the skin, respiratory, intestinal, and genitourinary tracts, tears, saliva, milk, blood cells, tumors, organs. A sample further refers to a medium, such as a nutrient broth or gel, which may contain cellular components, such as proteins or nucleic acid molecule.

[0889] Signal Sequences: As used herein, the phrase “signal sequences” refers to a sequence which can direct the transport or localization of a protein.

[0890] Single unit dose: As used herein, a “single unit dose” is a dose of any therapeutic administered in one dose/at one time/single route/single point of contact, i.e., single administration event.

[0891] Similarity: As used herein, the term “similarity” refers to the overall relatedness between polymeric molecules, e.g. between polynucleotide molecules (e.g. DNA molecules and/or RNA molecules) and/or between polypeptide molecules. Calculation of percent similarity of polymeric molecules to one another can be performed in the same manner as a calculation of percent identity, except that calculation of percent similarity takes into account conservative substitutions as is understood in the art.

[0892] Split dose: As used herein, a “split dose” is the division of single unit dose or total daily dose into two or more doses.

[0893] Stable: As used herein “stable” refers to a compound that is sufficiently robust to survive isolation to a useful degree of purity from a reaction mixture, and preferably capable of formulation into an efficacious therapeutic agent.

[0894] Stabilized: As used herein, the term “stabilize”, “stabilized,” “stabilized region” means to make or become stable.

[0895] Subject: As used herein, the term “subject” or “patient” refers to any organism to which a composition in accordance with the invention may be administered, e.g., for experimental, diagnostic, prophylactic, and/or therapeutic purposes. Typical subjects include animals (e.g., mammals such as mice, rats, rabbits, non-human primates, and humans) and/or plants.

[0896] Substantially: As used herein, the term “substantially” refers to the qualitative condition of exhibiting total or near-total extent or degree of a characteristic or property of interest. One of ordinary skill in the biological arts will understand that biological and chemical phenomena rarely, if ever, go to completion and/or proceed to completeness or achieve or avoid an absolute result. The term “substantially” is therefore used herein to capture the potential lack of completeness inherent in many biological and chemical phenomena.

[0897] Substantially equal: As used herein as it relates to time differences between doses, the term means plus/minus 2%.

[0898] Substantially simultaneously: As used herein and as it relates to plurality of doses, the term means within 2 seconds.

[0899] Suffering from: An individual who is “suffering from” a disease, disorder, and/or condition has been diagnosed with or displays one or more symptoms of a disease, disorder, and/or condition.

[0900] Susceptible to: An individual who is “susceptible to” a disease, disorder, and/or condition has not been diagnosed with and/or may not exhibit symptoms of the disease, disorder, and/or condition but harbors a propensity to develop a disease or its symptoms. In some embodiments, an individual who is susceptible to a disease, disorder, and/or condition (for example, cancer) may be characterized by one or more of the following: (1) a genetic mutation associated with development of the disease, disorder, and/or condition; (2) a genetic polymorphism associated with development of the disease, disorder, and/or condition; (3) increased and/or decreased expression and/or activity of a protein and/or nucleic acid associated with the disease, disorder, and/or condition; (4) habits and/or lifestyles associated with development of the disease, disorder, and/or condition; (5) a family history of the disease, disorder, and/or condition; and (6) exposure to and/or infection with a microbe associated with development of the disease, disorder, and/or condition. In some embodiments, an individual who is susceptible to a disease, disorder, and/or condition will develop the disease, disorder, and/or condition. In some embodiments, an individual who is susceptible to a disease, disorder, and/or condition will not develop the disease, disorder, and/or condition.

[0901] Sustained release: As used herein, the term “sustained release” refers to a pharmaceutical composition or compound release profile that conforms to a release rate over a specific period of time.

[0902] Synthetic: The term “synthetic” means produced, prepared, and/or manufactured by the hand of man. Synthesis of polynucleotides or polypeptides or other molecules of the present invention may be chemical or enzymatic.

[0903] Targeted Cells: As used herein, “targeted cells” refers to any one or more cells of interest. The cells may be found in vitro, in vivo, in situ or in the tissue or organ of an organism. The organism may be an animal, preferably a mammal, more preferably a human and most preferably a patient.

[0904] Therapeutic Agent: The term “therapeutic agent” refers to any agent that, when administered to a subject, has a therapeutic, diagnostic, and/or prophylactic effect and/or elicits a desired biological and/or pharmacological effect.

[0905] Therapeutically effective amount: As used herein, the term “therapeutically effective amount” means an amount of an agent to be delivered (e.g., nucleic acid, drug, therapeutic agent, diagnostic agent, prophylactic agent, etc.) that is sufficient, when administered to a subject suffering from or susceptible to a disease, disorder, and/or condition, to treat, improve symptoms of, diagnose, prevent, and/or delay the onset of the disease, disorder, and/or condition.

[0906] Therapeutically effective outcome: As used herein, the term “therapeutically effective outcome” means an outcome that is sufficient in a subject suffering from or susceptible to an infection, disease, disorder, and/or condition, to treat, improve symptoms of, diagnose, prevent, and/or delay the onset of the infection, disease, disorder, and/or condition.

[0907] Total daily dose: As used herein, a “total daily dose” is an amount given or prescribed in 24 hr period. It may be administered as a single unit dose.

[0908] Transcription factor: As used herein, the term “transcription factor” refers to a DNA-binding protein that regulates transcription of DNA into RNA, for example, by activation or repression of transcription. Some transcription factors effect regulation of transcription alone, while others act in concert with other proteins. Some transcription factor can both activate and repress transcription under certain conditions. In general, transcription factors bind a specific target sequence or sequences highly similar to a specific consensus sequence in a regulatory region of a target gene. Transcription factors may regulate transcription of a target gene alone or in a complex with other molecules.

[0909] Treating: As used herein, the term “treating” refers to partially or completely alleviating, ameliorating, improving, relieving, delaying onset of, inhibiting progression of, reducing severity of, and/or reducing incidence of one or more symptoms or features of a particular disease, disorder, and/or condition. For example, “treating” cancer may refer to inhibiting survival, growth, and/or spread of a tumor. Treatment may be administered to a subject who does not exhibit signs of a disease, disorder, and/or condition and/or to a subject who exhibits only early signs of a disease, disorder, and/or condition for the purpose of decreasing the risk of developing pathology associated with the disease, disorder, and/or condition.

[0910] Unmodified: As used herein, “unmodified” refers to any substance, compound or molecule prior to being changed in any way. Unmodified may, but does not always, refer to the wild type or native form of a biomolecule. Molecules may undergo a series of modifications whereby each modified molecule may serve as the “unmodified” starting molecule for a subsequent modification.

[0911] Viability: As used herein, the term “viability” refers to the ability of a thing (a living organism, an artificial system, an organ, tissue, explant, etc.) to maintain itself or recover its potentialities. In the context of the present invention, organ viability may be improved through the use of the modified mRNAs. To “increase the viability” of an organ or tissue or explant refers to improving the usefulness or integrity of the organ, tissue or explants. To “increase the longevity” of an organ or tissue or explant refers to prolong as a function of time, the ability of the organ or tissue or explants to maintain a desired status or recover a desired status. As used herein, an organ, tissue or explants “status” refers to the physiological, physical or chemical state of being. A “useable status” is one in which the organ, tissue or explants may be employed for a desired study, experiment, investigation, trial, or other exploratory event. To “increase the functionality” of an organ, tissue or explant means to maintain or improve the ability of the organ, tissue or explant to operate as it normally would.

### EQUIVALENTS AND SCOPE

[0912] Those skilled in the art will recognize, or be able to ascertain using no more than routine experimentation, many equivalents to the specific embodiments in accordance with the invention described herein. The scope of the present invention is not intended to be limited to the above Description, but rather is as set forth in the appended claims.

[0913] In the claims, articles such as “a,” “an,” and “the” may mean one or more than one unless indicated to the contrary or otherwise evident from the context. Claims or descriptions that include “or” between one or more members of a group are considered satisfied if one, more than one, or all of the group members are present in, employed in, or otherwise relevant to a given product or process unless indicated to the contrary or otherwise evident from the context. The invention includes embodiments in which exactly one member of the group is present in, employed in, or otherwise relevant to a given product or process. The invention includes embodiments in which more than one, or all of the group members are present in, employed in, or otherwise relevant to a given product or process.

[0914] It is also noted that the term “comprising” is intended to be open and permits the inclusion of additional elements or steps.

[0915] Where ranges are given, endpoints are included. Furthermore, it is to be understood that unless otherwise indicated or otherwise evident from the context and understanding of one of ordinary skill in the art, values that are expressed as ranges can assume any specific value or subrange within the stated ranges in different embodiments of the invention, to the tenth of the unit of the lower limit of the range, unless the context clearly dictates otherwise.

[0916] In addition, it is to be understood that any particular embodiment of the present invention that falls within the prior art may be explicitly excluded from any one or more of the claims. Since such embodiments are deemed to be known to one of ordinary skill in the art, they may be excluded even if the exclusion is not set forth explicitly herein. Any particular embodiment of the compositions of the invention (e.g., any nucleic acid or protein encoded thereby; any method of production; any method of use; etc.) can be excluded from any one or more claims, for any reason, whether or not related to the existence of prior art.

[0917] All cited sources, for example, references, publications, databases, database entries, and art cited herein, are incorporated into this application by reference, even if not expressly stated in the citation. In case of conflicting statements of a cited source and the instant application, the statement in the instant application shall control.

### EXAMPLES

### Example 1

### Modified mRNA Production

[0918] Modified mRNAs according to the invention are made using standard laboratory methods and materials.

[0919] The open reading frame with various upstream or downstream additions (β-globin, tags, etc.) is ordered from DNA2.0 (Menlo Park, Calif.) and typically contains a multiple cloning site with XbaI recognition. Upon receipt of the construct, it is reconstituted and transformed into chemically competent E. coli. For the present invention, NEB DH5-alpha Competent E. coli are used. Transformations are performed according to NEB instructions using 100 ng of plasmid. The protocol is as follows:
[0920] 1. Thaw a tube of NEB 5-alpha Competent E. coli cells on ice for 10 minutes.
[0921] 2. Add 1-5 μl containing 1 pg-100 ng of plasmid DNA to the cell mixture. Carefully flick the tube 4-5 times to mix cells and DNA. Do not vortex.
[0922] 3. Place the mixture on ice for 30 minutes. Do not mix.
[0923] 4. Heat shock at 42° C. for exactly 30 seconds. Do not mix.
[0924] 5. Place on ice for 5 minutes. Do not mix.
[0925] 6. Pipette 950 μl of room temperature SOC into the mixture.
[0926] 7. Place at 37° C. for 60 minutes. Shake vigorously (250 rpm) or rotate.
[0927] 8. Warm selection plates to 37° C.
[0928] 9. Mix the cells thoroughly by flicking the tube and inverting.

[0929] Spread 50-100 μl of each dilution onto a selection plate and incubate overnight at 37° C. Alternatively, incubate at 30° C. for 24-36 hours or 25° C. for 48 hours.

[0930] A single colony is then used to inoculate 5 ml of LB growth media using the appropriate antibiotic and then allowed to grow (250 RPM, 37° C.) for 5 hours. This is then used to inoculate a 200 ml culture medium and allowed to grow overnight under the same conditions.

[0931] To isolate the plasmid (up to 850 μg), a maxi prep is performed using the Invitrogen PureLink™ HiPure Maxiprep Kit (Carlsbad, Calif.), following the manufacturer's instructions.

[0932] In order to generate cDNA for In Vitro Transcription (IVT), the plasmid is first linearized using a restriction enzyme such as XbaI. A typical restriction digest with XbaI will comprise the following: Plasmid 1.0 μg; 10× Buffer 1.0 μl; XbaI 1.5 μl; dH₂O up to 10 μl; incubated at 37° C. for 1 hr. If performing at lab scale (<5 μg), the reaction is cleaned up using Invitrogen's PureLink™ PCR Micro Kit (Carlsbad, Calif.) per manufacturer's instructions. Larger scale purifications may need to be done with a product that has a larger load capacity such as Invitrogen's standard PureLink PCR Kit (Carlsbad, Calif.). Following the cleanup, the linearized vector is quantified using the NanoDrop and analyzed to confirm linearization using agarose gel electrophoresis.

[0933] As a non-limiting example, G-CSF may represent the polypeptide of interest. Sequences used in the steps outlined in Examples 1-5 are shown in Table 5. It should be noted that the start codon (ATG or AUG) has been underlined in Table 5.

TABLE 5
G-CSF Sequences

| SEQ | |
|---|---|
| ID | |
| NO | Description |
| 253 | cDNA sequence: |
| | ATGGCTGGACCTGCCACCCAGAGCCCCATGAAGCTGATGGCCC |
| | TGCAGCTGCTGCTGTGGCACAGTGCACTCTGGACAGTGCAGGA |
| | AGCCACCCCCCTGGGCCCTGCCAGCTCCCTGCCCCAGAGCTTC |
| | CTGCTCAAGTGCTTAGAGCAAGTGAGGAAGATCCAGGGCGATG |
| | GCGCAGCGCTCCAGGAGAAGCTGTGTGCCACCTACAAGCTGTG |
| | CCACCCCGAGGAGCTGGTGCTGCTCGGACACTCTCTGGGCATC |
| | CCCTGGGCTCCCCTGAGCAGCTGCCCCAGCCAGGCCCTGCAGC |
| | TGGCAGGCTGCTTGAGCCAACTCCATAGCGGCCTTTTCCTCTA |
| | CCAGGGGCTCCTGCAGGCCCTGGAAGGGATCTCCCCCGAGTTG |
| | GGTCCCACCTTGGACACACTGCAGCTGGACGTCGCCGACTTTG |
| | CCACCACCATCTGGCAGCAGATGGAAGAACTGGGAATGGCCCC |
| | TGCCCTGCAGCCCACCCAGGGTGCCATGCCGGCCTTCGCCTCT |
| | GCTTTCCAGCGCCGGGCAGGAGGGGTCCTGGTTGCCTCCCATC |
| | TGCAGAGCTTCCTGGAGGTGTCGTACCGCGTTCTACGCCACCT |
| | TGCCCAGCCCTGA |
| 254 | cDNA having T7 polymerase site, AfeI and |
| | Xba restriction site: |
| | TAATACGACTCACTATA |
| | GGGAAATAAGAGAGAAAAGAAGAGTAAGAAGAAATATAAGAGC |
| | CACCATGGCTGGACCTGCCACCCAGAGCCCCATGAAGCTGATG |
| | GCCCTGCAGCTGCTGCTGTGGCACAGTGCACTCTGGACAGTGC |
| | AGGAAGCCACCCCCCTGGGCCCTGCCAGCTCCCTGCCCCAGAG |
| | CTTCCTGCTCAAGTGCTTAGAGCAAGTGAGGAAGATCCAGGGC |
| | GATGGCGCAGCGCTCCAGGAGAAGCTGTGTGCCACCTACAAGC |
| | TGTGCCACCCCGAGGAGCTGGTGCTGCTCGGACACTCTCTGGG |
| | CATCCCCTGGGCTCCCCTGAGCAGCTGCCCCAGCCAGGCCCTG |
| | CAGCTGGCAGGCTGCTTGAGCCAACTCCATAGCGGCCTTTTCC |
| | TCTACCAGGGGCTCCTGCAGGCCCTGGAAGGGATCTCCCCCGA |
| | GTTGGGTCCCACCTTGGACACACTGCAGCTGGACGTCGCCGAC |
| | TTTGCCACCACCATCTGGCAGCAGATGGAAGAACTGGGAATGG |
| | CCCCTGCCCTGCAGCCCACCCAGGGTGCCATGCCGGCCTTCGC |
| | CTCTGCTTTCCAGCGCCGGGCAGGAGGGGTCCTGGTTGCCTCC |
| | CATCTGCAGAGCTTCCTGGAGGTGTCGTACCGCGTTCTACGCC |
| | ACCTTGCCCAGCCCTGAAGCGCTGCCTTCTGCGGGGCTTGCCT |
| | TCTGGCCATGCCCTTCTTCTCTCCCTTGCACCTGTACCTCTTG |
| | GTCTTTGAATAAAGCCTGAGTAGGAAGGCGGCCGCTCGAGCAT |
| | GCATCTAGA |
| 255 | Optimized sequence; containing T7 polymerase |
| | site, AfeI and Xba restriction site |
| | TAATACGACTCACTATA |
| | GGGAAATAAGAGAGAAAAGAAGAGTAAGAAGAAATATAAGAGC |
| | CACCATGGCCGGTCCCGCGACCCAAAGCCCCATGAAACTTATG |
| | GCCCTGCAGTTGCTGCTTTGGCACTCGGCCCTCTGGACAGTCC |
| | AAGAAGCGACTCCTCTCGGACCTGCCTCATCGTTGCCGCAGTC |
| | ATTCCTTTTGAAGTGTCTGGAGCAGGTGCGAAAGATTCAGGGC |
| | GATGGAGCCGCACTCCAAGAGAAGCTCTGCGCGACATACAAAC |
| | TTTGCCATCCCGAGGAGCTCGTACTGCTCGGGCACAGCTTGGG |
| | GATTCCCTGGGCTCCTCTCTCGTCCTGTCCGTCGCAGGCTTTG |
| | CAGTTGGCAGGGTGCCTTTCCCAGCTCCACTCCGGTTTGTTCT |
| | TGTATCAGGGACTGCTGCAAGCCCTTGAGGGAATCTCGCCAGA |
| | ATTGGGCCCGACGCTGGACACGTTGCAGCTCGACGTGGCGGAT |
| | TTCGCAACAACCATCTGGCAGCAGATGGAGGAACTGGGGATGG |
| | CACCCGCGCTGCAGCCCACGCAGGGGGCAATGCCGGCCTTTGC |
| | GTCCGCGTTTCAGCGCAGGGCGGGTGGAGTCCTCGTAGCGAGC |
| | CACCTTCAATCATTTTTGGAAGTCTCGTACCGGGTGCTGAGAC |
| | ATCTTGCGCAGCCGTGAAGCGCTGCCTTCTGCGGGGCTTGCCT |
| | TCTGGCCATGCCCTTCTTCTCTCCCTTGCACCTGTACCTCTTG |
| | GTCTTTGAATAAAGCCTGAGTAGGAAGGCGGCCGCTCGAGCAT |
| | GCATCTAGA |
| 256 | mRNA sequence (transcribed) |
| | GGGAAAUAAGAGAGAAAAGAAGAGUAAGAAGAAAUAUAAGAGC |
| | CACCAUGGCCGGUCCCGCGACCCAAAGCCCCAUGAAACUUAUG |
| | GCCCUGCAGUUGCUGCUUUGGCACUCGGCCCUCUGGACAGUCC |
| | AAGAAGCGACUCCUCUCGGACCUGCCUCAUCGUUGCCGCAGUC |
| | AUUCCUUUUGAAGUGUCUGGAGCAGGUGCGAAAGAUUCAGGGC |
| | GAUGGAGCCGCACUCCAAGAGAAGCUCUGCGCGACAUACAAAC |
| | UUUGCCAUCCCGAGGAGCUCGUACUGCUCGGGCACAGCUUGGG |
| | GAUUCCCUGGGCUCCUCUCUCGUCCUGUCCGUCGCAGGCUUUG |
| | CAGUUGGCAGGGUGCCUUUCCCAGCUCCACUCCGGUUUGUUCU |
| | UGUAUCAGGGACUGCUGCAAGCCCUUGAGGGAAUCUCGCCAGA |
| | AUUGGGCCCGACGCUGGACACGUUGCAGCUCGACGUGGCGGAU |
| | UUCGCAACAACCAUCUGGCAGCAGAUGGAGGAACUGGGGAUGG |
| | CACCCGCGCUGCAGCCCACGCAGGGGGCAAUGCCGGCCUUUGC |
| | GUCCGCGUUUCAGCGCAGGGCGGGUGGAGUCCUCGUAGCGAGC |
| | CACCUUCAAUCAUUUUUGGAAGUCUCGUACCGGGUGCUGAGAC |
| | AUCUUGCGCAGCCGUGAAGCGCUGCCUUCUGCGGGGCUUGCCU |
| | UCUGGCCAUGCCCUUCUUCUCUCCCUUGCACCUGUACCUCUUG |
| | GUCUUUGAAUAAAGCCUGAGUAGGAAG |

### Example 2

### PCR for cDNA Production

[0934] PCR procedures for the preparation of cDNA is performed using 2×KAPA HiFi™ HotStart ReadyMix by Kapa Biosystems (Woburn, Mass.). This system includes 2×KAPA ReadyMix 12.5 μl; Forward Primer (10 uM) 0.75 μl; Reverse Primer (10 uM) 0.75 μl; Template cDNA 100 ng; and dH₂O diluted to 25.0 μl. The reaction conditions are at 95° C. for 5 min. and 25 cycles of 98° C. for 20 sec, then 58° C. for 15 sec, then 72° C. for 45 sec, then 72° C. for 5 min. then 4° C. to termination.

[0935] The reverse primer of the instant invention incorporates a poly-T₁₂₀ for a poly-A₁₂₀ in the mRNA. Other reverse primers with longer or shorter poly(T) tracts can be used to adjust the length of the poly(A) tail in the mRNA.

[0936] The reaction is cleaned up using Invitrogen's PureLink™ PCR Micro Kit (Carlsbad, Calif.) per manufacturer's instructions (up to 5 μg). Larger reactions will require a cleanup using a product with a larger capacity. Following the cleanup, the cDNA is quantified using the NanoDrop and analyzed by agarose gel electrophoresis to confirm the cDNA is the expected size. The cDNA is then submitted for sequencing analysis before proceeding to the in vitro transcription reaction.

### Example 3

### In Vitro Transcription

[0937] The in vitro transcription reaction generates mRNA containing modified nucleotides or modified RNA. The input nucleotide triphosphate (NTP) mix is made in-house using natural and un-natural NTPs.

[0938] A typical in vitro transcription reaction includes the following:

| | | | |
|---|---|---|---|
| 1. | Template cDNA | 1.0 | μg |
| 2. | 10x transcription buffer (400 mM Tris-HCl | 2.0 | μl |
| | pH 8.0, 190 mM MgCl2, 50 mM DTT, 10 mM | | |
| | Spermidine) | | |
| 3. | Custom NTPs (25 mM each) | 7.2 | μl |
| 4. | RNase Inhibitor | 20 | U |
| 5. | T7 RNA polymerase | 3000 | U |
| 6. | dH₂0 | Up to 20.0 | μl. and |
| 7. | Incubation at 37° C. for 3 hr-5 hrs. | | |

[0939] The crude IVT mix may be stored at 4° C. overnight for cleanup the next day. 1 U of RNase-free DNase is then used to digest the original template. After 15 minutes of incubation at 37° C., the mRNA is purified using Ambion's MEGAclear™ Kit (Austin, Tex.) following the manufacturer's instructions. This kit can purify up to 500 μg of RNA. Following the cleanup, the RNA is quantified using the NanoDrop and analyzed by agarose gel electrophoresis to confirm the RNA is the proper size and that no degradation of the RNA has occurred.

### Example 4

### Enzymatic Capping of mRNA

[0940] Capping of the mRNA is performed as follows where the mixture includes: IVT RNA 60 μg-180 μg and dH₂O up to 72 μl. The mixture is incubated at 65° C. for 5 minutes to denature RNA, then transfer immediately to ice.

[0941] The protocol then involves the mixing of 10× Capping Buffer (0.5 M Tris-HCl (pH 8.0), 60 mM KCl, 12.5 mM MgCl2) (10.0 μl); 20 mM GTP (5.0 μl); 20 mM S-Adenosyl Methionine (2.5 μl); RNase Inhibitor (100 U); 2′-O-Methyltransferase (400U); Vaccinia capping enzyme (Guanylyl transferase) (40 U); dH₂O (Up to 28 μl); and incubation at 37° C. for 30 minutes for 60 μg RNA or up to 2 hours for 180 μg of RNA.

[0942] The mRNA is then purified using Ambion's MEGAclear™ Kit (Austin, Tex.) following the manufacturer's instructions. Following the cleanup, the RNA is quantified using the NanoDrop (ThermoFisher, Waltham, Mass.) and analyzed by agarose gel electrophoresis to confirm the RNA is the proper size and that no degradation of the RNA has occurred. The RNA product may also be sequenced by running a reverse-transcription-PCR to generate the cDNA for sequencing.

### Example 5

### PolyA Tailing Reaction

[0943] Without a poly-T in the cDNA, a poly-A tailing reaction must be performed before cleaning the final product. This is done by mixing Capped IVT RNA (100 μl); RNase Inhibitor (20 U); 10× Tailing Buffer (0.5 M Tris-HCl (pH 8.0), 2.5 M NaCl, 100 mM MgCl2)(12.0 μl); 20 mM ATP (6.0 μl); Poly-A Polymerase (20 U); dH₂O up to 123.5 μl and incubation at 37° C. for 30 min. If the poly-A tail is already in the transcript, then the tailing reaction may be skipped and proceed directly to cleanup with Ambion's MEGAclear™ kit (up to 500 μg). Poly-A Polymerase is preferably a recombinant enzyme expressed in yeast.

### Example 6

### Enzymatic vs. Chemical Caps

### Exemplary Capping Structures.

[0944] 5′-capping of modified RNA may be completed concomitantly during the in vitro-transcription reaction using the following chemical RNA cap analogs to generate the 5′-guanosine cap structure according to manufacturer protocols: 3″-O-Me-m7G(5)ppp(5′)G; G(5′)ppp(5′)A; G(5′)ppp(5′)G; m7G(5′)ppp(5′)A; m7G(5′)ppp(5′)G (New England BioLabs, Ipswich, Mass.). 5′-capping of modified RNA may be completed post-transcriptionally using a Vaccinia Virus Capping Enzyme to generate the “Cap 0” structure: m7G(5′)ppp(5′)G (New England BioLabs, Ipswich, Mass.). Cap 1 structure may be generated using both Vaccinia Virus Capping Enzyme and a 2′-O methyl-transferase to generate: m7G(5′)ppp(5′)G-2′-O-methyl. Cap 2 structure may be generated from the Cap 1 structure followed by the 2′-O-methylation of the 5′-antepenultimate nucleotide using a 2′-O methyl-transferase. Cap 3 structure may be generated from the Cap 2 structure followed by the 2′-O-methylation of the 5′-preantepenultimate nucleotide using a 2′-O methyl-transferase. Enzymes are preferably derived from a recombinant source.

[0945] When transfected into mammalian cells, the modified mRNAs may have a stability of between 12-18 hours or more than 18 hours, e.g., 24, 36, 48, 60, 72 or greater than 72 hours.

### Example 7

### Chemical Cap Vs. Enzymatically-Derived Cap Protein Expression Assay

[0946] Synthetic mRNAs encoding human G-CSF containing the ARCA cap analog or the Cap1 structure can be transfected into human primary keratinocytes at equal concentrations. 6, 12, 24 and 36 hours post-transfection the amount of G-CSF secreted into the culture medium can be assayed by ELISA. Synthetic mRNAs that secrete higher levels of G-CSF into the medium would correspond to a synthetic mRNA with a higher translationally-competent Cap structure.

### Example 8

### Chemical Cap Vs. Enzymatically-Derived Cap Purity Analysis

[0947] Synthetic mRNAs encoding human G-CSF containing the ARCA cap analog or the Cap1 structure crude synthesis products can be compared for purity using denaturing Agarose-Urea gel electrophoresis or HPLC analysis. Synthetic mRNAs with a single, consolidated band by electrophoresis correspond to the higher purity product compared to a synthetic mRNA with multiple bands or streaking bands. Synthetic mRNAs with a single HPLC peak would also correspond to a higher purity product. The capping reaction with a higher efficiency would provide a more pure mRNA population.

### Example 9

### Chemical Cap Vs. Enzymatically-Derived Cap Cytokine Analysis

[0948] Synthetic mRNAs encoding human G-CSF containing the ARCA cap analog or the Cap1 structure can be transfected into human primary keratinocytes at multiple concentrations. 6, 12, 24 and 36 hours post-transfection the amount of pro-inflammatory cytokines such as TNF-alpha and IFN-beta secreted into the culture medium can be assayed by ELISA. Synthetic mRNAs that secrete higher levels of pro-inflammatory cytokines into the medium would correspond to a synthetic mRNA containing an immune-activating cap structure.

### Example 10

### Chemical Cap Vs. Enzymatically-Derived Cap Capping Reaction Efficiency

[0949] Synthetic mRNAs encoding human G-CSF containing the ARCA cap analog or the Cap1 structure can be analyzed for capping reaction efficiency by LC-MS after capped mRNA nuclease treatment. Nuclease treatment of capped mRNAs would yield a mixture of free nucleotides and the capped 5′-5-triphosphate cap structure detectable by LC-MS. The amount of capped product on the LC-MS spectra can be expressed as a percent of total mRNA from the reaction and would correspond to capping reaction efficiency. The cap structure with a higher capping reaction efficiency would have a higher amount of capped product by LC-MS.

### Example 11

### Agarose Gel Electrophoresis of Modified RNA or RT PCR Products

[0950] Individual modRNAs (200-400 ng in a 20 μl volume) or reverse transcribed PCR products (200-400 ng) are loaded into a well on a non-denaturing 1.2% Agarose E-Gel (Invitrogen, Carlsbad, Calif.) and run for 12-15 minutes according to the manufacturer protocol.

### Example 12

### Nanodrop Modified RNA Quantification and UV Spectral Data

[0951] Modified RNAs in TE buffer (1 μl) are used for Nanodrop UV absorbance readings to quantitate the yield of each modified RNA from an in vitro transcription reaction.

### Example 13

### Formulation of Modified mRNA Using Lipidoids

[0952] Modified mRNAs (mmRNAs) were made using standard laboratory methods and materials for in vitro transcription with the exception that the nucleotide mix contained modified nucleotides. The open reading frame (ORF) of the gene of interest is flanked by a 5′ untranslated region (UTR) containing a strong Kozak translational initiation signal and an alpha-globin 3′ UTR terminating with an oligo(dT) sequence for templated addition of a polyA tail for mmRNAs not incorporating Adenosine analogs. Adenosine-containing mmRNAs were synthesized without an oligo (dT) sequence to allow for post-transcription poly (A) polymerase poly-(A) tailing. In some cases, the mmRNAs were modified by incorporating chemically modified nucleotides from the list indicated in Table 2 during the in vitro transcription with 100% replacement of the corresponding natural nucleotide or partial replacement of the corresponding natural nucleotide at the indicated percentage.

[0953] Modified mRNA are formulated for in vitro experiments by mixing the mmRNA with the lipidoid at a set ratio prior to addition to cells. In vivo formulation requires the addition of extra ingredients to facilitate circulation throughout the body. To test the ability of these lipidoids to form particles suitable for in vivo work, a standard formulation process used for siRNA-lipidoid formulations was used as a starting point. Initial mmRNA-lipidoid formulations consist of particles composed of 42% lipidoid, 48% cholesterol and 10% PEG, with further optimization of ratios possible. After formation of the particle, mmRNA was added and allowed to integrate with the complex. The encapsulation efficiency was determined using a standard dye exclusion assays.

### Example 14

### In Vitro Expression of Modified RNA-Encoded Proteins in Human Cells Using Lipidoid Formulations

[0954] RNA transfections can be carried out using various different lipidoids, including, but not limited to, 98N12-5, C12-200, and MD1. The 98N12-5 (Akinc et al., Nat Biotechnol. 2008 26:561-569; Frank-Kamenetsky et al., Proc Natl Acad Sci USA. 2008 105:11915-11920; Akinc et al., Mol Ther. 2009 17:872-879; herein incorporated by reference in their entirety), C12-200 (Love et at., Proc Natl Acad Sci USA. 2010 107:1864-1869), and MD1 (Alnylam Oligonucleotide Therapeutic Society 2011 poster presentation, http://www.alnylam.com/capella/wp-content/uploads/2011/09/ALNY-OTS-NextGenLNPs-Sep20111.pdf; herein incorporated by reference in their entirety), have been demonstrated to be efficient at siRNA delivery, but are untested using single stranded mmRNA.

[0955] The ratio of mmRNA to lipidoid used to test for in vitro transfection is tested empirically at different lipidoid:mmRNA ratios. Previous work using siRNA and lipidoids have utilized 2.5:1, 5:1, 10:1, and 15:1 lipidoid:siRNA wt:wt ratios. Given the longer length of mmRNA relative to siRNA, a lower wt:wt ratio of lipidoid to mmRNA may be effective. In addition, for comparison mmRNA were also formulated using RNAiMax (Invitrogen) or TRANSIT-mRNA (Minis Bio) cationic lipid delivery vehicles. The ability of lipidoid-formulated Luciferase, GFP, G-CSF, and EPO mmRNA to express the desired protein product can be confirmed by luminescence for luciferase expression, flow cytometry for GFP expression, and by ELISA for G-CSF and Erythropoietin (EPO) secretion.

### Example 15

### In Vivo Expression of Modified RNA-Encoded Proteins Following Intravenous Injection Using Lipidoid Formulations

[0956] Systemic intravenous administration of the formulations may be created using various different lipidoids, including 98N12-5, C12-200, and MD1. The 98N12-5 (Akinc et al., Nat Biotechnol. 2008 26:561-569; Frank-Kamenetsky et al., Proc Natl Acad Sci USA. 2008 105:11915-11920; Akinc et al., Mol Ther. 2009 17:872-879), C12-200 (Love et at., Proc Natl Acad Sci USA. 2010 107:1864-1869; Leuschner et al., Nat Biotechnol 2011 29:1005-1010), and MD1 (Alnylam Oligonucleotide Therapeutic Society 2011 poster presentation, http://www.alnylam.com/capella/wp-content/uploads/2011/09/ALNY-OTS-NextGenLNPs-Sep20111.pdf), have all been demonstrated to be efficient at siRNA in vivo delivery and mRNA silencing, but are untested using single stranded mmRNA.

[0957] Lipidoid formulations containing mmRNA can be injected intravenously into animals. The expression of the mmRNA-encoded proteins can be assessed in blood and other organs samples such as the liver and spleen collected from the animal. Conducting single dose intravenous studies will also allow an assessment of the magnitude, dose responsiveness, and longevity of expression of the desired product. In a study, lipidoid based formulations 98N12-5, C12-200, MD1 and other lipidoid-based formulations, may be used to deliver luciferase, green fluorescent protein (GFP), human G-CSF, or human Erythropoietin (EPO) mmRNA into the animal. After formulation of mmRNA with the lipidoid formulations as described previously, animals are divided into groups to receive either a saline formulation, or a lipidoid-formulation containing one of four different mmRNA selected from luciferase, GFP, human G-CSF and human EPO. Prior to injection into the animal, mmRNA-containing lipidoid formulations are diluted in PBS. Animals are then administered a single dose of formulated mmRNA ranging from a dose of 10 mg/kg to doses as low as 1 ng/kg, with a preferred range to be 10 mg/kg to 100 ng/kg, depending on the amount of mmRNA injected per animal body weight. If the animal is a mouse, the volume of an intravenous injection of the lipidoid formulation is a maximum of 0.2 ml for a 20 gram mouse. At various points in time following the administration of the mmRNA-lipidoid, serum, tissues, and tissue lysates can be obtained and the level of the mmRNA-encoded product determined. The ability of lipidoid-formulated Luciferase, GFP, G-CSF, and EPO mmRNA to express the desired protein product can be confirmed by luminescence for luciferase expression, flow cytometry for GFP expression, and by ELISA for G-CSF and Erythropoietin (EPO) secretion.

[0958] Additional studies for a multi-dose regimen can also be performed to determine the maximal expression using mmRNA, to evaluate the saturability of the mmRNA-driven expression (achieved by giving a control and active mmRNA formulation in parallel or in sequence), and to determine the feasibility of repeat drug administration (by giving mmRNA in doses separated by weeks or months and then determining whether expression level is affected by factors such as immunogenicity). In addition to detection of the expressed protein product, an assessment of the physiological function of proteins such as G-CSF and EPO can also be determined through analyzing samples from the animal tested and detecting increases in granulocyte and red blood cell counts, respectively.

### Example 16

### In Vivo Expression of Modified RNA-Encoded Proteins Following Intramuscular and/or Subcutaneous Injection Using Lipidoid Formulations

[0959] The use of lipidoid formulations to deliver oligonucleotides, including siRNA, via an intramuscular route or a subcutaneous route of injection needs to be evaluated as it has not been previously reported. The intramuscular and/or subcutaneous injection of mmRNA-containing lipidoid formulations will be evaluated to determine if they are capable to produce both localized and systemic expression of the desired proteins.

[0960] Lipidoid formulations containing mmRNA can be injected intramuscularly and/or subcutaneously into animals. The expression of mmRNA-encoded proteins can be assessed both within the muscle or subcutaneous tissue and systemically in blood and other organs such as the liver and spleen. The ability of 98N12-5, C12-200, and MD1-based lipidoid formulations, and possibly other lipidoid-based formulations, to deliver either luciferase, green fluorescent protein (GFP), human G-CSF, or human Erythropoietin (EPO) mmRNA will be evaluated. Conducting single dose studies will also allow an assessment of the magnitude, dose responsiveness, and longevity of expression of the desired product. After the formulation of mmRNA with the lipidoid formulations, as described previously, animals will be divided into groups receiving either a saline formulation, or a lipidoid-formulation containing one of four different mmRNA selected from, luciferase, GFP, human G-CSF, human EPO. Prior to injection, mmRNA-containing lipidoid formulations are diluted in PBS and animals administered a single intramuscular dose of formulated mmRNA ranging from 50 mg/kg to doses as low as 1 ng/kg with a preferred range to be 10 mg/kg to 100 ng/kg. If the animal tested is a mouse the maximum dose can be roughly 1 mg mmRNA or as low as 0.02 ng mmRNA if administered once into the hind limb. Likewise for subcutaneous administration, mmRNA-containing lipidoid formulations are diluted in PBS before the animals are administered a single subcutaneous dose of formulated mmRNA ranging from 400 mg/kg- to doses as low as 1 ng/kg. A preferred dosage range may be 80 mg/kg to 100 ng/kg. If the animal tested is a mouse, the maximum dose administered can be roughly 8 mg mmRNA or as low as 0.02 ng mmRNA if the dose is administered once subcutaneously.

[0961] It is preferred that the volume of a single intramuscular injection is maximally 0.025 ml and of a single subcutaneous injection is maximally 0.2 ml for a 20 gram mouse. The dose of the mmRNA administered to the animal is calculated depending on the body weight of the animal. At various points in time points following the administration of the mmRNA-lipidoid, serum, tissues, and tissue lysates can be obtained and the level of the mmRNA-encoded product determined. The ability of lipidoid-formulated Luciferase, GFP, G-CSF, and EPO mmRNA to express the desired protein product can be confirmed by luminescence for luciferase expression, flow cytometry for GFP expression, and by ELISA for G-CSF and Erythropoietin (EPO) secretion.

[0962] Additional studies for a multi-dose regimen can also be performed to determine the maximal expression using mmRNA, to evaluate the saturability of the mmRNA-driven expression (achieved by giving a control and active mmRNA formulation in parallel or in sequence), and to determine the feasibility of repeat drug administration (by giving mmRNA in doses separated by weeks or months and then determining whether expression level is affected by factors such as immunogenicity). Studies utilizing multiple subcutaneous or intramuscular injection sites at one time point, can also be utilized to further increase mmRNA drug exposure and improve protein production. In addition to detection of the expressed protein product, an assessment of the physiological function of proteins such as G-CSF and EPO can also be determined through analyzing samples from the animal tested and detecting increases in granulocyte and red blood cell counts, respectively.

### Example 17

### In Vitro Transfection of VEGF-A

[0963] Human vascular endothelial growth factor-isoform A (VEGF-A) modified mRNA (mRNA sequence shown in SEQ ID NO: 257; poly-A tail of approximately 160 nucleotides not shown in sequence; 5′ cap, Cap1) was transfected via reverse transfection in Human Keratinocyte cells in 24 multi-well plates. Human Keratinocytes cells were grown in EPILIFE® medium with Supplement S7 from Invitrogen (Carlsbad, Calif.) until they reached a confluence of 50-70%. The cells were transfected with 0, 46.875, 93.75, 187.5, 375, 750, and 1500 ng of modified mRNA (mmRNA) encoding VEGF-A which had been complexed with RNAIMAX™ from Invitrogen (Carlsbad, Calif.). The RNA:RNAIMAX™ complex was formed by first incubating the RNA with Supplement-free EPILIFE® media in a 5× volumetric dilution for 10 minutes at room temperature. In a second vial, RNAIMAX™ reagent was incubated with Supplement-free EPILIFE® Media in a 10× volumetric dilution for 10 minutes at room temperature. The RNA vial was then mixed with the RNAIMAX™ vial and incubated for 20-30 minutes at room temperature before being added to the cells in a drop-wise fashion.

[0964] The fully optimized mRNA encoding VEGF-A transfected with the Human Keratinocyte cells included modifications during translation such as natural nucleoside triphosphates (NTP), pseudouridine at each uridine site and 5-methylcytosine at each cytosine site (pseudo-U/5mC), and N1-methyl-pseudouridine at each uridine site and 5-methylcytosine at each cytosine site (N1-methyl-Pseudo-U/5mC). Cells were transfected with the mmRNA encoding VEGF-A and secreted VEGF-A concentration (ρg/ml) in the culture medium was measured at 6, 12, 24, and 48 hours post-transfection for each of the concentrations using an ELISA kit from Invitrogen (Carlsbad, Calif.) following the manufacturers recommended instructions. These data, shown in Table 6, show that modified mRNA encoding VEGF-A is capable of being translated in Human Keratinocyte cells and that VEGF-A is transported out of the cells and released into the extracellular environment.

TABLE 6
VEGF-A Dosing and Protein Secretion

| | | | | |
|---|---|---|---|---|
| | 6 hours | 12 hours | 24 hours | 48 hours |
| Dose (ng) | (pg/ml) | (pg/ml) | (pg/ml) | (pg/ml) |

VEGF-A Dose Containing Natural NTPs

| | | | | |
|---|---|---|---|---|
| 46.875 | 10.37 | 18.07 | 33.90 | 67.02 |
| 93.75 | 9.79 | 20.54 | 41.95 | 65.75 |
| 187.5 | 14.07 | 24.56 | 45.25 | 64.39 |
| 375 | 19.16 | 37.53 | 53.61 | 88.28 |
| 750 | 21.51 | 38.90 | 51.44 | 61.79 |
| 1500 | 36.11 | 61.90 | 76.70 | 86.54 |

VEGF-A Dose Containing Pseudo-U/5mC

| | | | | |
|---|---|---|---|---|
| 46.875 | 10.13 | 16.67 | 33.99 | 72.88 |
| 93.75 | 11.00 | 20.00 | 46.47 | 145.61 |
| 187.5 | 16.04 | 34.07 | 83.00 | 120.77 |
| 375 | 69.15 | 188.10 | 448.50 | 392.44 |
| 750 | 133.95 | 304.30 | 524.02 | 526.58 |
| 1500 | 198.96 | 345.65 | 426.97 | 505.41 |

VEGF-A Dose Containing N1-methyl-Pseudo-U/5mC

| | | | | |
|---|---|---|---|---|
| 46.875 | 0.03 | 6.02 | 27.65 | 100.42 |
| 93.75 | 12.37 | 46.38 | 121.23 | 167.56 |
| 187.5 | 104.55 | 365.71 | 1025.41 | 1056.91 |
| 375 | 605.89 | 1201.23 | 1653.63 | 1889.23 |
| 750 | 445.41 | 1036.45 | 1522.86 | 1954.81 |
| 1500 | 261.61 | 714.68 | 1053.12 | 1513.39 |

### Example 18

### In Vitro Expression of VEGF Modified mRNA

[0965] HEK293 cells were transfected with modified mRNA (mmRNA) VEGF-A (mRNA sequence shown in SEQ ID NO: 257; polyA tail of approximately 160 nucleotides not shown in sequence; 5′cap, Cap1; fully modified with 5-methylcytosine and pseudouridine) which had been complexed with Lipofectamine2000 from Invitrogen (Carlsbad, Calif.) at the concentration shown in Table 7. The protein expression was detected by ELISA and the protein (pg/ml) is shown in Table 7.

TABLE 7
Protein Expression

| Amount | 10 | 2.5 | 625 | 156 | 39 | 10 | 2 | 610 |
|---|---|---|---|---|---|---|---|---|
| Transfected | ng | ng | pg | pg | pg | pg | pg | fg |
| Protein | 10495 | 10038 | 2321.23 | 189.6 | 0 | 0 | 0 | 0 |
| (pg/ml) | | | | | | | | |

### Example 19

### Directed SAR of Pseudouridine and N1-methyl PseudoUridine

[0966] With the recent focus on the pyrimidine nucleoside pseudouridine, a series of structure-activity studies were designed to investigate mRNA containing modifications to pseudouridine or N1-methyl-pseudourdine.

[0967] The study was designed to explore the effect of chain length, increased lipophilicity, presence of ring structures, and alteration of hydrophobic or hydrophilic interactions when modifications were made at the N1 position, C6 position, the 2-position, the 4-position and on the phosphate backbone. Stability is also investigated.

[0968] To this end, modifications involving alkylation, cycloalkylation, alkyl-cycloalkylation, arylation, alkyl-arylation, alkylation moieties with amino groups, alkylation moieties with carboxylic acid groups, and alkylation moieties containing amino acid charged moieties are investigated. The degree of alkylation is generally C1-C6. Examples of the chemistry modifications include those listed in Table 8 and Table 9.

TABLE 8
Pseudouridine and N1-methyl Pseudo Uridine SAR

| | | Naturally |
|---|---|---|
| Chemistry Modification | Compound # | occuring |
| N1-Modifications | | |
| N1-Ethyl-pseudo-UTP | 1 | N |
| N1-Propyl-pseudo-UTP | 2 | N |
| N1-iso-propyl-pseudo-UTP | 3 | N |
| N1-(2,2,2-Trifluoroethyl)-pseudo-UTP | 4 | N |
| N1-Cyclopropyl-pseudo-UTP | 5 | N |
| N1-Cyclopropylmethyl-pseudo-UTP | 6 | N |
| N1-Phenyl-pseudo-UTP | 7 | N |
| N1-Benzyl-pseudo-UTP | 8 | N |
| N1-Aminomethyl-pseudo-UTP | 9 | N |
| Pseudo-UTP-N1-2-ethanoic acid | 10 | N |
| N1-(3-Amino-3-carboxypropyl)pseudo-UTP | 11 | N |
| N1-Methyl-3-(3-amino-3- | 12 | Y |
| carboxypropyl)pseudo-UTP | | |
| C-6 Modifications | | |
| 6-Methyl-pseudo-UTP | 13 | N |
| 6-Trifluoromethyl-pseudo-UTP | 14 | N |
| 6-Methoxy-pseudo-UTP | 15 | N |
| 6-Phenyl-pseudo-UTP | 16 | N |
| 6-Iodo-pseudo-UTP | 17 | N |
| 6-Bromo-pseudo-UTP | 18 | N |
| 6-Chloro-pseudo-UTP | 19 | N |
| 6-Fluoro-pseudo-UTP | 20 | N |
| 2- or 4-position Modifications | | |
| 4-Thio-pseudo-UTP | 21 | N |
| 2-Thio-pseudo-UTP | 22 | N |
| Phosphate backbone Modifications | | |
| Alpha-thio-pseudo-UTP | 23 | N |
| N1-Me-alpha-thio-pseudo-UTP | 24 | N |

TABLE 9
Pseudouridine and N1-methyl Pseudo Uridine SAR

| | | Naturally |
|---|---|---|
| Chemistry Modification | Compound # | occuring |
| N1-Methyl-pseudo-UTP | 1 | Y |
| N1-Butyl-pseudo-UTP | 2 | N |
| N1-tert-Butyl-pseudo-UTP | 3 | N |
| N1-Pentyl-pseudo-UTP | 4 | N |
| N1-Hexyl-pseudo-UTP | 5 | N |
| N1-Trifluoromethyl-pseudo-UTP | 6 | Y |
| N1-Cyclobutyl-pseudo-UTP | 7 | N |
| N1-Cyclopentyl-pseudo-UTP | 8 | N |
| N1-Cyclohexyl-pseudo-UTP | 9 | N |
| N1-Cycloheptyl-pseudo-UTP | 10 | N |
| N1-Cyclooctyl-pseudo-UTP | 11 | N |
| N1-Cyclobutylmethyl-pseudo-UTP | 12 | N |
| N1-Cyclopentylmethyl-pseudo-UTP | 13 | N |
| N1-Cyclohexylmethyl-pseudo-UTP | 14 | N |
| N1-Cycloheptylmethyl-pseudo-UTP | 15 | N |
| N1-Cyclooctylmethyl-pseudo-UTP | 16 | N |
| N1-p-tolyl-pseudo-UTP | 17 | N |
| N1-(2,4,6-Trimethyl-phenyl)pseudo-UTP | 18 | N |
| N1-(4-Methoxy-phenyl)pseudo-UTP | 19 | N |
| N1-(4-Amino-phenyl)pseudo-UTP | 20 | N |
| N1(4-Nitro-phenyl)pseudo-UTP | 21 | N |
| Pseudo-UTP-N1-p-benzoic acid | 22 | N |
| N1-(4-Methyl-benzyl)pseudo-UTP | 24 | N |
| N1-(2,4,6-Trimethyl-benzyl)pseudo-UTP | 23 | N |
| N1-(4-Methoxy-benzyl)pseudo-UTP | 25 | N |
| N1-(4-Amino-benzyl)pseudo-UTP | 26 | N |
| N1-(4-Nitro-benzyl)pseudo-UTP | 27 | N |
| Pseudo-UTP-N1-methyl-p-benzoic acid | 28 | N |
| N1-(2-Amino-ethyl)pseudo-UTP | 29 | N |
| N1-(3-Amino-propyl)pseudo-UTP | 30 | N |
| N1-(4-Amino-butyl)pseudo-UTP | 31 | N |
| N1-(5-Amino-pentyl)pseudo-UTP | 32 | N |
| N1-(6-Amino-hexyl)pseudo-UTP | 33 | N |
| Pseudo-UTP-N1-3-propionic acid | 34 | N |
| Pseudo-UTP-N1-4-butanoic acid | 35 | N |
| Pseudo-UTP-N1-5-pentanoic acid | 36 | N |
| Pseudo-UTP-N1-6-hexanoic acid | 37 | N |
| Pseudo-UTP-N1-7-heptanoic acid | 38 | N |
| N1-(2-Amino-2-carboxyethyl)pseudo-UTP | 39 | N |
| N1-(4-Amino-4-carboxybutyl)pseudo-UTP | 40 | N |
| N3-Alkyl-pseudo-UTP | 41 | N |
| 6-Ethyl-pseudo-UTP | 42 | N |
| 6-Propyl-pseudo-UTP | 43 | N |
| 6-iso-Propyl-pseudo-UTP | 44 | N |
| 6-Butyl-pseudo-UTP | 45 | N |
| 6-tert-Butyl-pseudo-UTP | 46 | N |
| 6-(2,2,2-Trifluoroethyl)-pseudo-UTP | 47 | N |
| 6-Ethoxy-pseudo-UTP | 48 | N |
| 6-Trifluoromethoxy-pseudo-UTP | 49 | N |
| 6-Phenyl-pseudo-UTP | 50 | N |
| 6-(Substituted-Phenyl)-pseudo-UTP | 51 | N |
| 6-Cyano-pseudo-UTP | 52 | N |
| 6-Azido-pseudo-UTP | 53 | N |
| 6-Amino-pseudo-UTP | 54 | N |
| 6-Ethylcarboxylate-pseudo-UTP | 54b | N |
| 6-Hydroxy-pseudo-UTP | 55 | N |
| 6-Methylamino-pseudo-UTP | 55b | N |
| 6-Dimethylamino-pseudo-UTP | 57 | N |
| 6-Hydroxyamino-pseudo-UTP | 59 | N |
| 6-Formyl-pseudo-UTP | 60 | N |
| 6-(4-Morpholino)-pseudo-UTP | 61 | N |
| 6-(4-Thiomorpholino)-pseudo-UTP | 62 | N |
| N1-Me-4-thio-pseudo-UTP | 63 | N |
| N1-Me-2-thio-pseudo-UTP | 64 | N |
| 1,6-Dimethyl-pseudo-UTP | 65 | N |
| 1-Methyl-6-trifluoromethyl-pseudo-UTP | 66 | N |
| 1-Methyl-6-ethyl-pseudo-UTP | 67 | N |
| 1-Methyl-6-propyl-pseudo-UTP | 68 | N |
| 1-Methyl-6-iso-propyl-pseudo-UTP | 69 | N |
| 1-Methyl-6-butyl-pseudo-UTP | 70 | N |
| 1-Methyl-6-tert-butyl-pseudo-UTP | 71 | N |
| 1-Methyl-6-(2,2,2-Trifluoroethyl)pseudo-UTP | 72 | N |
| 1-Methyl-6-iodo-pseudo-UTP | 73 | N |
| 1-Methyl-6-bromo-pseudo-UTP | 74 | N |
| 1-Methyl-6-chloro-pseudo-UTP | 75 | N |
| 1-Methyl-6-fluoro-pseudo-UTP | 76 | N |
| 1-Methyl-6-methoxy-pseudo-UTP | 77 | N |
| 1-Methyl-6-ethoxy-pseudo-UTP | 78 | N |
| 1-Methyl-6-trifluoromethoxy-pseudo-UTP | 79 | N |
| 1-Methyl-6-phenyl-pseudo-UTP | 80 | N |
| 1-Methyl-6-(substituted phenyl)pseudo-UTP | 81 | N |
| 1-Methyl-6-cyano-pseudo-UTP | 82 | N |
| 1-Methyl-6-azido-pseudo-UTP | 83 | N |
| 1-Methyl-6-amino-pseudo-UTP | 84 | N |
| 1-Methyl-6-ethylcarboxylate-pseudo-UTP | 85 | N |
| 1-Methyl-6-hydroxy-pseudo-UTP | 86 | N |
| 1-Methyl-6-methylamino-pseudo-UTP | 87 | N |
| 1-Methyl-6-dimethylamino-pseudo-UTP | 88 | N |
| 1-Methyl-6-hydroxyamino-pseudo-UTP | 89 | N |
| 1-Methyl-6-formyl-pseudo-UTP | 90 | N |
| 1-Methyl-6-(4-morpholino)-pseudo-UTP | 91 | N |
| 1-Methyl-6-(4-thiomorpholino)-pseudo-UTP | 92 | N |
| 1-Alkyl-6-vinyl-pseudo-UTP | 93 | N |
| 1-Alkyl-6-allyl-pseudo-UTP | 94 | N |
| 1-Alkyl-6-homoallyl-pseudo-UTP | 95 | N |
| 1-Alkyl-6-ethynyl-pseudo-UTP | 96 | N |
| 1-Alkyl-6-(2-propynyl)-pseudo-UTP | 97 | N |
| 1-Alkyl-6-(1-propynyl)-pseudo-UTP | 98 | N |

### Example 20

### Incorporation of Naturally and Non-Naturally Occurring Nucleosides

[0969] Naturally and non-naturally occurring nucleosides are incorporated into mRNA encoding a polypeptide of interest. Examples of these are given in Tables 10 and 11. Certain commercially available nucleoside triphosphates (NTPs) are investigated in the polynucleotides of the invention. A selection of these are given in Table 11. The resultant mRNA are then examined for their ability to produce protein, induce cytokines, and/or produce a therapeutic outcome.

TABLE 10
Naturally and non-naturally occurring nucleosides

| | | Naturally |
|---|---|---|
| Chemistry Modification | Compound # | occuring |
| N4-Methyl-Cytosine | 1 | Y |
| N4,N4-Dimethyl-2′-OMe-Cytosine | 2 | Y |
| 5-Oxyacetic acid-methyl ester-Uridine | 3 | Y |
| N3-Methyl-pseudo-Uridine | 4 | Y |
| 5-Hydroxymethyl-Cytosine | 5 | Y |
| 5-Trifluoromethyl-Cytosine | 6 | N |
| 5-Trifluoromethyl-Uridine | 7 | N |
| 5-Methyl-amino-methyl-Uridine | 8 | Y |
| 5-Carboxy-methyl-amino-methyl-Uridine | 9 | Y |
| 5-Carboxymethylaminomethyl-2′-OMe-Uridine | 10 | Y |
| 5-Carboxymethylaminomethyl-2-thio-Uridine | 11 | Y |
| 5-Methylaminomethyl-2-thio-Uridine | 12 | Y |
| 5-Methoxy-carbonyl-methyl-Uridine | 13 | Y |
| 5-Methoxy-carbonyl-methyl-2′-OMe-Uridine | 14 | Y |
| 5-Oxyacetic acid-Uridine | 15 | Y |
| 3-(3-Amino-3-carboxypropyl)-Uridine | 16 | Y |
| 5-(carboxyhydroxymethyl)uridine methyl ester | 17 | Y |
| 5-(carboxyhydroxymethyl)uridine | 18 | Y |

TABLE 11
Non-naturally occurring nucleoside triphosphates

| | | Naturally |
|---|---|---|
| Chemistry Modification | Compound # | occuring |
| N1-Me-GTP | 1 | N |
| 2′-OMe-2-Amino-ATP | 2 | N |
| 2′-OMe-pseudo-UTP | 3 | Y |
| 2′-OMe-6-Me-UTP | 4 | N |
| 2′-Azido-2′-deoxy-ATP | 5 | N |
| 2′-Azido-2′-deoxy-GTP | 6 | N |
| 2′-Azido-2′-deoxy-UTP | 7 | N |
| 2′-Azido-2′-deoxy-CTP | 8 | N |
| 2′-Amino-2′-deoxy-ATP | 9 | N |
| 2′-Amino-2′-deoxy-GTP | 10 | N |
| 2′-Amino-2′-deoxy-UTP | 11 | N |
| 2′-Amino-2′-deoxy-CTP | 12 | N |
| 2-Amino-ATP | 13 | N |
| 8-Aza-ATP | 14 | N |
| Xanthosine-5′-TP | 15 | N |
| 5-Bromo-CTP | 16 | N |
| 2′-F-5-Methyl-2′-deoxy-UTP | 17 | N |
| 5-Aminoallyl-CTP | 18 | N |
| 2-Amino-riboside-TP | 19 | N |

### Example 21

### Incorporation of Modifications to the Nucleobase and Carbohydrate (Sugar)

[0970] Naturally and non-naturally occurring nucleosides are incorporated into mRNA encoding a polypeptide of interest. Commercially available nucleosides and NTPs having modifications to both the nucleobase and carbohydrate (sugar) are examined for their ability to be incorporated into mRNA and to produce protein, induce cytokines, and/or produce a therapeutic outcome. Examples of these nucleosides are given in Tables 22 and 23.

TABLE 22
Combination modifications

| Chemistry Modification | Compound # |
|---|---|
| 5-iodo-2′-fluoro-deoxyuridine | 1 |
| 5-iodo-cytidine | 6 |
| 2′-bromo-deoxyuridine | 7 |
| 8-bromo-adenosine | 8 |
| 8-bromo-guanosine | 9 |
| 2,2′-anhydro-cytidine hydrochloride | 10 |
| 2,2′-anhydro-uridine | 11 |
| 2′-Azido-deoxyuridine | 12 |
| 2-amino-adenosine | 13 |
| N4-Benzoyl-cytidine | 14 |
| N4-Amino-cytidine | 15 |
| 2′-O-Methyl-N4-Acetyl-cytidine | 16 |
| 2′Fluoro-N4-Acetyl-cytidine | 17 |
| 2′Fluor-N4-Bz-cytidine | 18 |
| 2′O-methyl-N4-Bz-cytidine | 19 |
| 2′O-methyl-N6-Bz-deoxyadenosine | 20 |
| 2′Fluoro-N6-Bz-deoxyadenosine | 21 |
| N2-isobutyl-guanosine | 22 |
| 2′Fluro-N2-isobutyl-guanosine | 23 |
| 2′O-methyl-N2-isobutyl-guanosine | 24 |

TABLE 23
Naturally occuring combinations

| | | Naturally |
|---|---|---|
| Name | Compound # | occurring |
| 5-Methoxycarbonylmethyl-2-thiouridine TP | 1 | Y |
| 5-Methylaminomethyl-2-thiouridine TP | 2 | Y |
| 5-Crbamoylmethyluridine TP | 3 | Y |
| 5-Carbamoylmethyl-2′-O-methyluridine TP | 4 | Y |
| 1-Methyl-3-(3-amino-3- | 5 | Y |
| carboxypropyl)pseudouridine TP | | |
| 5-Methylaminomethyl-2-selenouridine TP | 6 | Y |
| 5-Carboxymethyluridine TP | 7 | Y |
| 5-Methyldihydrouridine TP | 8 | Y |
| lysidine TP | 9 | Y |
| 5-Taurinomethyluridine TP | 10 | Y |
| 5-Taurinomethyl-2-thiouridine TP | 11 | Y |
| 5-(iso-Pentenylaminomethyl)uridine TP | 12 | Y |
| 5-(iso-Pentenylaminomethyl)-2-thiouridine TP | 13 | Y |
| 5-(iso-Pentenylaminomethyl)-2′-O- | 14 | Y |
| methyluridine TP | | |
| N4-Acetyl-2′-O-methylcytidine TP | 15 | Y |
| N4,2′-O-Dimethylcytidine TP | 16 | Y |
| 5-Formyl-2′-O-methylcytidine TP | 17 | Y |
| 2′-O-Methylpseudouridine TP | 18 | Y |
| 2-Thio-2′-O-methyluridine TP | 19 | Y |
| 3,2′-O-Dimethyluridine TP | 20 | Y |

In the tables “UTP” stands for uridine triphosphate, “GTP” stands for guanosine triphosphate, “ATP” stands for adenosine triphosphate, “CTP” stands for cytosine triphosphate, “TP” stands for triphosphate and “Bz” stands for benzyl.

### Example 22

### In Vitro VEGF PBMC Study

[0971] 500 ng of VEGF mRNA (SEQ ID NO: 257 polyA tail of approximately 160 nucleotides not shown in sequence; 5′cap, Cap1) fully modified with 5-methylcytosine and pseudouridine (VEGF 5mC/pU), fully modified with 5-methylcytosine and N1-methylpseudouridine (VEGF 5mC/N1mpU) or unmodified (VEGF unmod) was transfected with 0.4 uL of Lipofectamine 2000 into peripheral blood mononuclear cells (PBMC) from three normal blood donors (D1, D2, and D3). Cells were also untreated for each donor as a control. The supernatant was harvested and run by ELISA 22 hours after transfection to determine the protein expression and cytokine induction. The expression of VEGF and IFN-alpha induction is shown in Table 24.

TABLE 24
Protein and Cytokine levels

| | VEGF Expression | | | IFN-alpha Induction | | |
|---|---|---|---|---|---|---|
| | (pg/ml) | | | (pg/ml) | | |
| | D1 | D2 | D3 | D1 | D2 | D3 |
| VEGF unmod | 2 | 0 | 0 | 5400 | 3537 | 4946 |
| VEGF 5 mC/pU | 424 | 871 | 429 | 145 | 294 | 106 |
| VEGF 5 mC/N1 mpU | 5088 | 10331 | 6183 | 205 | 165 | 6 |

### Example 23

### In Vitro Expression of Modified mRNA

[0972] HEK293 cells were transfected with VEGF-A modified mRNA (mRNA sequence shown in SEQ ID NO: 257; polyA tail of approximately 160 nucleotides not shown in sequence; 5′cap, Cap1; fully modified with 5-methylcytosine and pseudouridine) and HeLa cells were forward transfected with Transforming growth factor beta (TGF-beta) modified mRNA (mRNA sequence 258; poly A tail of approximately 160 nucleotides not shown in sequence; 5′cap, Cap1; fully modified with 5-methylcytosine and pseudouridine) which had been complexed with Lipofectamine2000 from Invitrogen (Carlsbad, Calif.) at the concentrations shown in Table 25 and 26. The protein expression was detected by ELISA and the protein (pg/ml) is also shown in Table 25 and 26. For TGF-beta a control of untreated cells and a mock transfection of Lipofectamine2000 was also tested.

TABLE 25
VEGF-A Protein Expression

| Amount | 10 | 2.5 | 625 | 156 | 39 | 10 | 2 | 610 |
|---|---|---|---|---|---|---|---|---|
| Transfected | ng | ng | pg | pg | pg | pg | pg | fg |
| Protein | 10495 | 10038 | 2321.23 | 189.6 | 0 | 0 | 0 | 0 |
| (pg/ml) | | | | | | | | |

TABLE 26
TGF-beta Protein Expression

| | Amount Transfected | | | | |
|---|---|---|---|---|---|
| | 750 ng | 250 ng | 83 ng | Mock | Untreated |
| Protein | 5058 | 4325 | 3210 | 2 | 0 |
| (pg/ml) | | | | | |

[0973] It is to be understood that the words which have been used are words of description rather than limitation, and that changes may be made within the purview of the appended claims without departing from the true scope and spirit of the invention in its broader aspects.

[0974] While the present invention has been described at some length and with some particularity with respect to the several described embodiments, it is not intended that it should be limited to any such particulars or embodiments or any particular embodiment, but it is to be construed with references to the appended claims so as to provide the broadest possible interpretation of such claims in view of the prior art and, therefore, to effectively encompass the intended scope of the invention.

[0975] All publications, patent applications, patents, and other references mentioned herein are incorporated by reference in their entirety. In case of conflict, the present specification, including definitions, will control. In addition, section headings, the materials, methods, and examples are illustrative only and not intended to be limiting.

1. A method for increasing the viability, functionality or longevity of an organ or portion thereof comprising contacting a donor organism having said organ or portion thereof with composition comprising a modified mRNA, said modified mRNA comprising a nucleic acid sequence having greater than 80% identity to SEQ ID NO: 257, wherein said organ is a heart and wherein said modified mRNA composition is formulated in saline.

2. The method of claim 1, wherein said contacting the donor organism occurs either prior to any procedure to remove the heart or during heart removal.

3. The method of claim 2, wherein the donor organism is a mammal.

4. The method of claim 3, wherein the mammal is human.

5. The method of claim 2, wherein said contacting is prior to heart removal and is effected by delivery to the blood of the donor.

6. The method of claim 5 wherein delivery to the blood is facilitated at least in part by the use of, or in combination with, a medical device, system or component.

7. The method of claim 2, wherein said contacting is during heart-removal and is effected by delivery to the blood of the donor.

8. The method of claim 7 wherein delivery to the blood is facilitated at least in part by the use of, or in combination with, a medical device, system or component.

9. The method of claim 8, wherein the medical device is an ex-vivo organ care system.

10. The method of claim 1, wherein the formulated modified mRNA encodes VEGF.

11. A method of reducing reperfusion injury to an organ comprising contacting said organ with a formulated modified mRNA, said modified mRNA comprising a nucleic acid sequence having greater than 80% identity to SEQ ID NO: 257.

12. A method of reducing transplant rejection in an organism comprising contacting said organism with a formulated modified mRNA, said modified mRNA comprising a nucleic acid sequence having greater than 80% identity to SEQ ID NO: 257, and wherein said modified mRNA encodes VEGF.

The application's sequence listing, which the Patent Office published only in electronic form, follows.

SEQUENCE LISTING (263 sequences)

SEQ ID NO: 1 - DNA, 657 bp, Homo sapiens
gacaactcggtggtggccactgcgcagaccagacttcgctcgtactcgtgcgcctcgcttcgcttttcctccgcaaccatgtctgacaaacccgatatggctgagatcgagaaattcgataagtcgaaactgaagaagacagagacgcaagagaaaaatccactgccttccaaagaaacgattgaacaggagaagcaagcaggcgaatcgtaatgaggcgtgcgccgccaatatgcactgtacattccacaagcattgccttcttattttacttcttttagctgtttaactttgtaagatgcaaagaggttggatcaagtttaaatgactgtgctgcccctttcacatcaaagaactactgacaacgaaggccgcgcctgcctttcccatctgtctatctatctggctggcagggaaggaaagaacttgcatgttggtgaaggaagaagtggggtggaagaagtggggtgggacgacagtgaaatctagagtaaaaccaagctggcccaaggtgtcctgcaggctgtaatgcagtttaatcagagtgccatttttttttttgttcaaatgattttaattattggaatgcacaatttttttaatatgcaaataaaaagtttaaaaacttaaaaaaaaaaaaaaaaaaaaaaaaaaaaa

SEQ ID NO: 2 - DNA, 1702 bp, Homo sapiens
tgggaacagacagatcctttgttctgaggctcactcatctcccgagccccgagccgtctcccagcctcagacggctctgcgggctgcatctgtgcagcctggcagcggcggcgctgcgctgtgacattttcacagcccttcttgcagaggcatgtgtgctagggatgccgaaatgccgagagcgccggcaggactagcttccgggccgcgctttgtgtgctgggctgcagtgtggcgcgggcgaggaagctggtagggcggttgtcgcaagctccagctgcagcctccgcctacgtgagaagactagaaagcgggcgcaggaccaggcctgcgttgtttgcagagaggccgtggctacaaaatggaagtgcttttgcgacctgggctccattttaggaattcttgcccgattttaaccacttgaacgcggaagtggctttcctattctcttccaagccagcctttaattttaaacgctgtaattaacagttcacaggggtcaaattcctttattccggaacattccactttgagagggatctgtcctctttggtcccctgcgttttcaaatatttgaggaaaggtgtcgcctctttttctgtggaaagaggaagctcatgagcgcgaaacagcaggggacggagggcgagaagggctttctcaggttgcgggtcggagggcagaagcacagttcccagtacagagacccggacaggtggctgtttctcacgctcactttggattgctccctacggcttcctccgcagccatgtctgacaaacctggtatggctgagatcgagaaattcgataagtcgaaactgaagaagacagaaacgcaagagaagaatccattgtcttccaaagaaactatcgaacaggagaggcaagcaggcgaatcttaaacaggcatgtgccaccaatatctactgtacattctacaagcattgctttcttattttacttcttttacttgtttaacttggttagatgcaaacacgttggatgagtttgaaaggactatgctgcccttttgacatcaaagacctgctgacaatggaggccacgcctgcttctcccatcgcctgtctggctggcagggaaggaaaatagcttgaatgttggtgaaagacttagcggagtgggagggcagtgaaatctagagtaaaaccaagttgggccaagtgtcctgcagaatctaaaatgaagtttaatcagcgtgccatttttgttgttgtttgaaagattttaatttttggaatgcacagtttttatttaaaaaagacatttttaaaccactgcttgtgagattgcttgttgattggaaagagtgttttattcaccatttaaacgtttgcaaagtggcgtgccccttggcctcacaggcaaagaataacttaaaagctgacgatttgaataaattatgttacagtatgaaatatgttttacctggatatgtaaaataccttctttattctagctaattgggagatgattttttttggctaattgagattacctttagattatgttttcaaaactggcttatactgtaatctacaactaataagcactaatttagagttcagctatattgttgcatgtagtgagaagggacttaattacaaacttaagacgtaagtgtgcaataaagtaagctaagaagaaaaaaaaaaaaaaaaaaaaaaaaaaaaaaaaaaaaa

SEQ ID NO: 3 - DNA, 2377 bp, Homo sapiens
gaggccaggggagggtgcgaaggaggcgcctgcctccaacctgcgggcgggaggtgggtggctgcggggcaattgaaaaagagccggcgaggagttccccgaaacttgttggaactccgggctcgcgcggaggccaggagctgagcggcggcggctgccggacgatgggagcgtgagcaggacggtgataacctctccccgatcgggttgcgagggcgccgggcagaggccaggacgcgagccgccagcggtgggacccatcgacgacttcccggggcgacaggagcagccccgagagccagggcgagcgcccgttccaggtggccggaccgcccgccgcgtccgcgccgcgctccctgcaggcaacgggagacgcccccgcgcagcgcgagcgcctcagcgcggccgctcgctctccccctcgagggacaaacttttcccaaacccgatccgagcccttggaccaaactcgcctgcgccgagagccgtccgcgtagagcgctccgtctccggcgagatgtccgagcgcaaagaaggcagaggcaaagggaagggcaagaagaaggagcgaggctccggcaagaagccggagtccgcggcgggcagccagagcccagccttgcctccccgattgaaagagatgaaaagccaggaatcggctgcaggttccaaactagtccttcggtgtgaaaccagttctgaatactcctctctcagattcaagtggttcaagaatgggaatgaattgaatcgaaaaaacaaaccacaaaatatcaagatacaaaaaaagccagggaagtcagaacttcgcattaacaaagcatcactggctgattctggagagtatatgtgcaaagtgatcagcaaattaggaaatgacagtgcctctgccaatatcaccatcgtggaatcaaacgagatcatcactggtatgccagcctcaactgaaggagcatatgtgtcttcagagtctcccattagaatatcagtatccacagaaggagcaaatacttcttcatctacatctacatccaccactgggacaagccatcttgtaaaatgtgcggagaaggagaaaactttctgtgtgaatggaggggagtgcttcatggtgaaagacctttcaaacccctcgagatacttgtgcaagtgcccaaatgagtttactggtgatcgctgccaaaactacgtaatggccagcttctacaaggcggaggagctgtaccagaagagagtgctgaccataaccggcatctgcatcgccctccttgtggtcggcatcatgtgtgtggtggcctactgcaaaaccaagaaacagcggaaaaagctgcatgaccgtcttcggcagagccttcggtctgaacgaaacaatatgatgaacattgccaatgggcctcaccatcctaacccaccccccgagaatgtccagctggtgaatcaatacgtatctaaaaacgtcatctccagtgagcatattgttgagagagaagcagagacatccttttccaccagtcactatacttccacagcccatcactccactactgtcacccagactcctagccacagctggagcaacggacacactgaaagcatcctttccgaaagccactctgtaatcgtgatgtcatccgtagaaaacagtaggcacagcagcccaactgggggcccaagaggacgtcttaatggcacaggaggccctcgtgaatgtaacagcttcctcaggcatgccagagaaacccctgattcctaccgagactctcctcatagtgaaaggtaaaaccgaagggcaaagctactgcagaggagaaactcagtcagagaatccctgtgagcacctgcggtctcacctcaggaaatctactctaatcagaataaggggcggcagttacctgttctaggagtgctcctagttgatgaagtcatctctttgtttgacggaacttatttcttctgagcttctctcgtcgtcccagtgactgacaggcaacagactcttaaagagctgggatgctttgatgcggaaggtgcagcacatggagtttccagctctggccatgggctcagacccactcggggtctcagtgtcctcagttgtaacattagagagatggcatcaatgcttgataaggacccttctataattccaattgccagttatccaaactctgattcggtggtcgagctggcctcgtgttcttatctgctaaccctgtcttaccttccagcctcagttaagtcaaatcaagggctatgtcattgctgaatgtcatggggggcaactgcttgccctccaccctatagtatctattttatgaaattccaagaagggatgaataaataaatctcttggatgctgaaaaaaaaaaaaaaaaaa

SEQ ID NO: 4 - DNA, 1638 bp, Homo sapiens
gaggccaggggagggtgcgaaggaggcgcctgcctccaacctgcgggcgggaggtgggtggctgcggggcaattgaaaaagagccggcgaggagttccccgaaacttgttggaactccgggctcgcgcggaggccaggagctgagcggcggcggctgccggacgatgggagcgtgagcaggacggtgataacctctccccgatcgggttgcgagggcgccgggcagaggccaggacgcgagccgccagcggtgggacccatcgacgacttcccggggcgacaggagcagccccgagagccagggcgagcgcccgttccaggtggccggaccgcccgccgcgtccgcgccgcgctccctgcaggcaacgggagacgcccccgcgcagcgcgagcgcctcagcgcggccgctcgctctccccctcgagggacaaacttttcccaaacccgatccgagcccttggaccaaactcgcctgcgccgagagccgtccgcgtagagcgctccgtctccggcgagatgtccgagcgcaaagaaggcagaggcaaagggaagggcaagaagaaggagcgaggctccggcaagaagccggagtccgcggcgggcagccagagcccagccttgcctccccgattgaaagagatgaaaagccaggaatcggctgcaggttccaaactagtccttcggtgtgaaaccagttctgaatactcctctctcagattcaagtggttcaagaatgggaatgaattgaatcgaaaaaacaaaccacaaaatatcaagatacaaaaaaagccagggaagtcagaacttcgcattaacaaagcatcactggctgattctggagagtatatgtgcaaagtgatcagcaaattaggaaatgacagtgcctctgccaatatcaccatcgtggaatcaaacgctacatctacatccaccactgggacaagccatcttgtaaaatgtgcggagaaggagaaaactttctgtgtgaatggaggggagtgcttcatggtgaaagacctttcaaacccctcgagatacttgtgcaagtgcccaaatgagtttactggtgatcgctgccaaaactacgtaatggccagcttctacagtacgtccactccctttctgtctctgcctgaataggagcatgctcagttggtgctgctttcttgttgctgcatctcccctcagattccacctagagctagatgtgtcttaccagatctaatattgactgcctctgcctgtcgcatgagaacattaacaaaagcaattgtattacttcctctgttcgcgactagttggctctgagatactaataggtgtgtgaggctccggatgtttctggaattgatattgaatgatgtgatacaaattgatagtcaatatcaagcagtgaaatatgataataaaggcatttcaaagtctcacttttattgataaaataaaaatcattctactgaacagtccatcttctttatacaatgaccacatcctgaaaagggtgttgctaagctgtaaccgatatgcacttgaaatgatggtaagttaattttgattcagaatgtgttatttgtcacaaataaacataataaaaggagttcagatgtttttcttcattaaccaaaaaaaaaaaaaaa

SEQ ID NO: 5 - DNA, 1643 bp, Homo sapiens
gaggccaggggagggtgcgaaggaggcgcctgcctccaacctgcgggcgggaggtgggtggctgcggggcaattgaaaaagagccggcgaggagttccccgaaacttgttggaactccgggctcgcgcggaggccaggagctgagcggcggcggctgccggacgatgggagcgtgagcaggacggtgataacctctccccgatcgggttgcgagggcgccgggcagaggccaggacgcgagccgccagcggtgggacccatcgacgacttcccggggcgacaggagcagccccgagagccagggcgagcgcccgttccaggtggccggaccgcccgccgcgtccgcgccgcgctccctgcaggcaacgggagacgcccccgcgcagcgcgagcgcctcagcgcggccgctcgctctccccctcgagggacaaacttttcccaaacccgatccgagcccttggaccaaactcgcctgcgccgagagccgtccgcgtagagcgctccgtctccggcgagatgtccgagcgcaaagaaggcagaggcaaagggaagggcaagaagaaggagcgaggctccggcaagaagccggagtccgcggcgggcagccagagcccagccttgcctccccgattgaaagagatgaaaagccaggaatcggctgcaggttccaaactagtccttcggtgtgaaaccagttctgaatactcctctctcagattcaagtggttcaagaatgggaatgaattgaatcgaaaaaacaaaccacaaaatatcaagatacaaaaaaagccagggaagtcagaacttcgcattaacaaagcatcactggctgattctggagagtatatgtgcaaagtgatcagcaaattaggaaatgacagtgcctctgccaatatcaccatcgtggaatcaaacgagatcatcactggtatgccagcctcaactgaaggagcatatgtgtcttcagctacatctacatccaccactgggacaagccatcttgtaaaatgtgcggagaaggagaaaactttctgtgtgaatggaggggagtgcttcatggtgaaagacctttcaaacccctcgagatacttgtgcaagtaagaaaagaaatcctgtgtgtcgcttatgtctataactccttgtttcagatgattctatgtctcatgatgtattgttgctttttttccaattttgttgcatcatgttgaataatgctgttttatatgtagagtgttttaaaacattcacaccattcgtcatcactcctctgtcatatgcagaattgttttttgctcttttcaatgtgtgtgaggtgttttttgtttttgtttttgttttttgccatgttatttatagtgttgctttccttgtggtttttcttgttgttattcagaaaagatgtgcagatatcacagaggcctataacttttggtatctacttctacatccaatgtatgaattaagctgtaagataatgttgctttcttatcccagtgatcacctgccaaatgaataagacaacaaagagaagcagaagggcagaagattatttactgacatatatctattacacttgggattgtcttactgttgcataactattttttaaacggagtttagttttatattgctagtaaaaaaa

SEQ ID NO: 6 - DNA, 2604 bp, Homo sapiens
gcactcggggcgacagagagggaggaggcgcgcggggacggggacgcccaggaggacccactcgcgggtcccgctccgctccggcagcagcatggggaaaggacgcgcgggccgagttggcaccacagccttgcctccccgattgaaagagatgaaaagccaggaatcggctgcaggttccaaactagtccttcggtgtgaaaccagttctgaatactcctctctcagattcaagtggttcaagaatgggaatgaattgaatcgaaaaaacaaaccacaaaatatcaagatacaaaaaaagccagggaagtcagaacttcgcattaacaaagcatcactggctgattctggagagtatatgtgcaaagtgatcagcaaattaggaaatgacagtgcctctgccaatatcaccatcgtggaatcaaacgagatcatcactggtatgccagcctcaactgaaggagcatatgtgtcttcagagtctcccattagaatatcagtatccacagaaggagcaaatacttcttcatctacatctacatccaccactgggacaagccatcttgtaaaatgtgcggagaaggagaaaactttctgtgtgaatggaggggagtgcttcatggtgaaagacctttcaaacccctcgagatacttgtgcaagtgcccaaatgagtttactggtgatcgctgccaaaactacgtaatggccagcttctacaagcatcttgggattgaatttatggaggcggaggagctgtaccagaagagagtgctgaccataaccggcatctgcatcgccctccttgtggtcggcatcatgtgtgtggtggcctactgcaaaaccaagaaacagcggaaaaagctgcatgaccgtcttcggcagagccttcggtctgaacgaaacaatatgatgaacattgccaatgggcctcaccatcctaacccaccccccgagaatgtccagctggtgaatcaatacgtatctaaaaacgtcatctccagtgagcatattgttgagagagaagcagagacatccttttccaccagtcactatacttccacagcccatcactccactactgtcacccagactcctagccacagctggagcaacggacacactgaaagcatcctttccgaaagccactctgtaatcgtgatgtcatccgtagaaaacagtaggcacagcagcccaactgggggcccaagaggacgtcttaatggcacaggaggccctcgtgaatgtaacagcttcctcaggcatgccagagaaacccctgattcctaccgagactctcctcatagtgaaaggtatgtgtcagccatgaccaccccggctcgtatgtcacctgtagatttccacacgccaagctcccccaaatcgcccccttcggaaatgtctccacccgtgtccagcatgacggtgtccatgccttccatggcggtcagccccttcatggaagaagagagacctctacttctcgtgacaccaccaaggctgcgggagaagaagtttgaccatcaccctcagcagttcagctccttccaccacaaccccgcgcatgacagtaacagcctccctgctagccccttgaggatagtggaggatgaggagtatgaaacgacccaagagtacgagccagcccaagagcctgttaagaaactcgccaatagccggcgggccaaaagaaccaagcccaatggccacattgctaacagattggaagtggacagcaacacaagctcccagagcagtaactcagagagtgaaacagaagatgaaagagtaggtgaagatacgcctttcctgggcatacagaaccccctggcagccagtcttgaggcaacacctgccttccgcctggctgacagcaggactaacccagcaggccgcttctcgacacaggaagaaatccaggccaggctgtctagtgtaattgctaaccaagaccctattgctgtataaaacctaaataaacacatagattcacctgtaaaactttattttatataataaagtattccaccttaaattaaacaatttattttattttagcagttctgcaaatagaaaacaggaaaaaaacttttataaattaaatatatgtatgtaaaaatgtgttatgtgccatatgtagcaattttttacagtatttcaaaacgagaaagatatcaatggtgcctttatgttatgttatgtcgagagcaagttttgtacagttacagtgattgcttttccacagtatttctgcaaaacctctcatagattcagtttttgctggcttcttgtgcattgcattatgatgttgactggatgtatgatttgcaagacttgcaactgtccctctgtttgcttgtagtagcacccgatcagtatgtcttgtaatggcacatccatccagatatgcctctcttgtgtatgaagttttctttgctttcagaatatgaaatgagttgtgtctactctgccagccaaaggtttgcctcattgggctctgagataatagtagatccaacagcatgctactattaaatacagcaagaaactgcattaagtaatgttaaatattaggaagaaagtaatactgtgatttaaaaaaaact

SEQ ID NO: 7 - DNA, 2553 bp, Homo sapiens
gcactcggggcgacagagagggaggaggcgcgcggggacggggacgcccaggaggacccactcgcgggtcccgctccgctccggcagcagcatggggaaaggacgcgcgggccgagttggcaccacagccttgcctccccgattgaaagagatgaaaagccaggaatcggctgcaggttccaaactagtccttcggtgtgaaaccagttctgaatactcctctctcagattcaagtggttcaagaatgggaatgaattgaatcgaaaaaacaaaccacaaaatatcaagatacaaaaaaagccagggaagtcagaacttcgcattaacaaagcatcactggctgattctggagagtatatgtgcaaagtgatcagcaaattaggaaatgacagtgcctctgccaatatcaccatcgtggaatcaaacgagatcatcactggtatgccagcctcaactgaaggagcatatgtgtcttcagctacatctacatccaccactgggacaagccatcttgtaaaatgtgcggagaaggagaaaactttctgtgtgaatggaggggagtgcttcatggtgaaagacctttcaaacccctcgagatacttgtgcaagtgcccaaatgagtttactggtgatcgctgccaaaactacgtaatggccagcttctacaagcatcttgggattgaatttatggaggcggaggagctgtaccagaagagagtgctgaccataaccggcatctgcatcgccctccttgtggtcggcatcatgtgtgtggtggcctactgcaaaaccaagaaacagcggaaaaagctgcatgaccgtcttcggcagagccttcggtctgaacgaaacaatatgatgaacattgccaatgggcctcaccatcctaacccaccccccgagaatgtccagctggtgaatcaatacgtatctaaaaacgtcatctccagtgagcatattgttgagagagaagcagagacatccttttccaccagtcactatacttccacagcccatcactccactactgtcacccagactcctagccacagctggagcaacggacacactgaaagcatcctttccgaaagccactctgtaatcgtgatgtcatccgtagaaaacagtaggcacagcagcccaactgggggcccaagaggacgtcttaatggcacaggaggccctcgtgaatgtaacagcttcctcaggcatgccagagaaacccctgattcctaccgagactctcctcatagtgaaaggtatgtgtcagccatgaccaccccggctcgtatgtcacctgtagatttccacacgccaagctcccccaaatcgcccccttcggaaatgtctccacccgtgtccagcatgacggtgtccatgccttccatggcggtcagccccttcatggaagaagagagacctctacttctcgtgacaccaccaaggctgcgggagaagaagtttgaccatcaccctcagcagttcagctccttccaccacaaccccgcgcatgacagtaacagcctccctgctagccccttgaggatagtggaggatgaggagtatgaaacgacccaagagtacgagccagcccaagagcctgttaagaaactcgccaatagccggcgggccaaaagaaccaagcccaatggccacattgctaacagattggaagtggacagcaacacaagctcccagagcagtaactcagagagtgaaacagaagatgaaagagtaggtgaagatacgcctttcctgggcatacagaaccccctggcagccagtcttgaggcaacacctgccttccgcctggctgacagcaggactaacccagcaggccgcttctcgacacaggaagaaatccaggccaggctgtctagtgtaattgctaaccaagaccctattgctgtataaaacctaaataaacacatagattcacctgtaaaactttattttatataataaagtattccaccttaaattaaacaatttattttattttagcagttctgcaaatagaaaacaggaaaaaaacttttataaattaaatatatgtatgtaaaaatgtgttatgtgccatatgtagcaattttttacagtatttcaaaacgagaaagatatcaatggtgcctttatgttatgttatgtcgagagcaagttttgtacagttacagtgattgcttttccacagtatttctgcaaaacctctcatagattcagtttttgctggcttcttgtgcattgcattatgatgttgactggatgtatgatttgcaagacttgcaactgtccctctgtttgcttgtagtagcacccgatcagtatgtcttgtaatggcacatccatccagatatgcctctcttgtgtatgaagttttctttgctttcagaatatgaaatgagttgtgtctactctgccagccaaaggtttgcctcattgggctctgagataatagtagatccaacagcatgctactattaaatacagcaagaaactgcattaagtaatgttaaatattaggaagaaagtaatactgtgatttaaaaaaaact

SEQ ID NO: 8 - DNA, 2553 bp, Homo sapiens; identical to SEQ ID NO: 7

SEQ ID NO: 9 - DNA, 3069 bp, Homo sapiens
gaggccaggggagggtgcgaaggaggcgcctgcctccaacctgcgggcgggaggtgggtggctgcggggcaattgaaaaagagccggcgaggagttccccgaaacttgttggaactccgggctcgcgcggaggccaggagctgagcggcggcggctgccggacgatgggagcgtgagcaggacggtgataacctctccccgatcgggttgcgagggcgccgggcagaggccaggacgcgagccgccagcggtgggacccatcgacgacttcccggggcgacaggagcagccccgagagccagggcgagcgcccgttccaggtggccggaccgcccgccgcgtccgcgccgcgctccctgcaggcaacgggagacgcccccgcgcagcgcgagcgcctcagcgcggccgctcgctctccccctcgagggacaaacttttcccaaacccgatccgagcccttggaccaaactcgcctgcgccgagagccgtccgcgtagagcgctccgtctccggcgagatgtccgagcgcaaagaaggcagaggcaaagggaagggcaagaagaaggagcgaggctccggcaagaagccggagtccgcggcgggcagccagagcccagccttgcctccccgattgaaagagatgaaaagccaggaatcggctgcaggttccaaactagtccttcggtgtgaaaccagttctgaatactcctctctcagattcaagtggttcaagaatgggaatgaattgaatcgaaaaaacaaaccacaaaatatcaagatacaaaaaaagccagggaagtcagaacttcgcattaacaaagcatcactggctgattctggagagtatatgtgcaaagtgatcagcaaattaggaaatgacagtgcctctgccaatatcaccatcgtggaatcaaacgagatcatcactggtatgccagcctcaactgaaggagcatatgtgtcttcagagtctcccattagaatatcagtatccacagaaggagcaaatacttcttcatctacatctacatccaccactgggacaagccatcttgtaaaatgtgcggagaaggagaaaactttctgtgtgaatggaggggagtgcttcatggtgaaagacctttcaaacccctcgagatacttgtgcaagtgcccaaatgagtttactggtgatcgctgccaaaactacgtaatggccagcttctacaaggcggaggagctgtaccagaagagagtgctgaccataaccggcatctgcatcgccctccttgtggtcggcatcatgtgtgtggtggcctactgcaaaaccaagaaacagcggaaaaagctgcatgaccgtcttcggcagagccttcggtctgaacgaaacaatatgatgaacattgccaatgggcctcaccatcctaacccaccccccgagaatgtccagctggtgaatcaatacgtatctaaaaacgtcatctccagtgagcatattgttgagagagaagcagagacatccttttccaccagtcactatacttccacagcccatcactccactactgtcacccagactcctagccacagctggagcaacggacacactgaaagcatcctttccgaaagccactctgtaatcgtgatgtcatccgtagaaaacagtaggcacagcagcccaactgggggcccaagaggacgtcttaatggcacaggaggccctcgtgaatgtaacagcttcctcaggcatgccagagaaacccctgattcctaccgagactctcctcatagtgaaaggtatgtgtcagccatgaccaccccggctcgtatgtcacctgtagatttccacacgccaagctcccccaaatcgcccccttcggaaatgtctccacccgtgtccagcatgacggtgtccatgccttccatggcggtcagccccttcatggaagaagagagacctctacttctcgtgacaccaccaaggctgcgggagaagaagtttgaccatcaccctcagcagttcagctccttccaccacaaccccgcgcatgacagtaacagcctccctgctagccccttgaggatagtggaggatgaggagtatgaaacgacccaagagtacgagccagcccaagagcctgttaagaaactcgccaatagccggcgggccaaaagaaccaagcccaatggccacattgctaacagattggaagtggacagcaacacaagctcccagagcagtaactcagagagtgaaacagaagatgaaagagtaggtgaagatacgcctttcctgggcatacagaaccccctggcagccagtcttgaggcaacacctgccttccgcctggctgacagcaggactaacccagcaggccgcttctcgacacaggaagaaatccaggccaggctgtctagtgtaattgctaaccaagaccctattgctgtataaaacctaaataaacacatagattcacctgtaaaactttattttatataataaagtattccaccttaaattaaacaatttattttattttagcagttctgcaaatagaaaacaggaaaaaaacttttataaattaaatatatgtatgtaaaaatgtgttatgtgccatatgtagcaattttttacagtatttcaaaacgagaaagatatcaatggtgcctttatgttatgttatgtcgagagcaagttttgtacagttacagtgattgcttttccacagtatttctgcaaaacctctcatagattcagtttttgctggcttcttgtgcattgcattatgatgttgactggatgtatgatttgcaagacttgcaactgtccctctgtttgcttgtagtagcacccgatcagtatgtcttgtaatggcacatccatccagatatgcctctcttgtgtatgaagttttctttgctttcagaatatgaaatgagttgtgtctactctgccagccaaaggtttgcctcattgggctctgagataatagtagatccaacagcatgctactattaaatacagcaagaaactgcattaagtaatgttaaatattaggaagaaagtaatactgtgatttaaaaaaaact

SEQ ID NO: 10 - DNA, 3069 bp, Homo sapiens; identical to SEQ ID NO: 9

SEQ ID NO: 11 - DNA, 1694 bp, Homo sapiens
gaggccaggggagggtgcgaaggaggcgcctgcctccaacctgcgggcgggaggtgggtggctgcggggcaattgaaaaagagccggcgaggagttccccgaaacttgttggaactccgggctcgcgcggaggccaggagctgagcggcggcggctgccggacgatgggagcgtgagcaggacggtgataacctctccccgatcgggttgcgagggcgccgggcagaggccaggacgcgagccgccagcggtgggacccatcgacgacttcccggggcgacaggagcagccccgagagccagggcgagcgcccgttccaggtggccggaccgcccgccgcgtccgcgccgcgctccctgcaggcaacgggagacgcccccgcgcagcgcgagcgcctcagcgcggccgctcgctctccccctcgagggacaaacttttcccaaacccgatccgagcccttggaccaaactcgcctgcgccgagagccgtccgcgtagagcgctccgtctccggcgagatgtccgagcgcaaagaaggcagaggcaaagggaagggcaagaagaaggagcgaggctccggcaagaagccggagtccgcggcgggcagccagagcccagccttgcctccccgattgaaagagatgaaaagccaggaatcggctgcaggttccaaactagtccttcggtgtgaaaccagttctgaatactcctctctcagattcaagtggttcaagaatgggaatgaattgaatcgaaaaaacaaaccacaaaatatcaagatacaaaaaaagccagggaagtcagaacttcgcattaacaaagcatcactggctgattctggagagtatatgtgcaaagtgatcagcaaattaggaaatgacagtgcctctgccaatatcaccatcgtggaatcaaacgagatcatcactggtatgccagcctcaactgaaggagcatatgtgtcttcagagtctcccattagaatatcagtatccacagaaggagcaaatacttcttcatctacatctacatccaccactgggacaagccatcttgtaaaatgtgcggagaaggagaaaactttctgtgtgaatggaggggagtgcttcatggtgaaagacctttcaaacccctcgagatacttgtgcaagtaagaaaagaaatcctgtgtgtcgcttatgtctataactccttgtttcagatgattctatgtctcatgatgtattgttgctttttttccaattttgttgcatcatgttgaataatgctgttttatatgtagagtgttttaaaacattcacaccattcgtcatcactcctctgtcatatgcagaattgttttttgctcttttcaatgtgtgtgaggtgttttttgtttttgtttttgttttttgccatgttatttatagtgttgctttccttgtggtttttcttgttgttattcagaaaagatgtgcagatatcacagaggcctataacttttggtatctacttctacatccaatgtatgaattaagctgtaagataatgttgctttcttatcccagtgatcacctgccaaatgaataagacaacaaagagaagcagaagggcagaagattatttactgacatatatctattacacttgggattgtcttactgttgcataactattttttaaacggagtttagttttatattgctagtaaaaaaa

SEQ ID NO: 12 - DNA, 2374 bp, Homo sapiens
ggcttaactgatgcctgcctgcctctctttgatttgatggcctttattccttctaattggataaaataggaagtcactggcagtcctgtgtggctggggatactgattttactcagaccagcctgcagctctagagtgtgggtagagagcggggagtgggggttgggagagggggaggaaagagagagaggagagaggacgggcttggatgaagaagggaaagaaagagaaagagactgaagcagagaagagccgcagaggaagaaagtgaatgagcactcaagaaggacaaagaggagtagtcgggggtggggtggaggcagggcggggaagggagtgaccgcccctcctggctgcactcttgcctccggagccctctgatcctgtttgcagtgatgctccgagggcaggcacctgctgctctgtaatgattcagcccctttcagccgtcgtcgcgttaacacaacaggatgctgttgctattgtcactactgcctctcctgccgccgctgctgctgccgccgccgccaccgccgctggtcctccttctgcttttacttctcctgcatgacagttgttttcttcatctgagcagacaccagcttcagatgctcgaggtgagaaacatgcctttcagtttgggctactggtttacttaattaatcagccggcagctccgtcgatctattttcgtccctgtcctcttgacgagcccgggatggtttggagtagcatttaaaagaactagaaaagtggcccagaaacagcagcttaaagaattattacgatatactttgattttgtagttgctaggagcttttcttccccccttgcatctttctgaactcttcttgattttaataatggccttggacttggacgatttatcgatttccccctgtaagatgctgtatcatttggttgggggggcctctgcgtggtaatggaccgtgagagcggccaggccttcttctggaggtgagccgatggagatttattccccagacatgtctgaggtcgccgccgagaggtcctccagcccctccactcagctgagtgcagacccatctcttgatgggcttccggcagcagaagacatgccagagccccagactgaagatgggagaacccctggactcgtgggcctggccgtgccctgctgtgcgtgcctagaagctgagcgcctgagaggttgcctcaactcagagaaaatctgcattgtccccatcctggcttgcctggtcagcctctgcctctgcatcgccggcctcaagtgggtatttgtggacaagatctttgaatatgactctcctactcaccttgaccctggggggttaggccaggaccctattatttctctggacgcaactgctgcctcagctgtgtgggtgtcgtctgaggcatacacttcacctgtctctagggctcaatctgaaagtgaggttcaagttacagtgcaaggtgacaaggctgttgtctcctttgaaccatcagcggcaccgacaccgaagaatcgtatttttgccttttctttcttgccgtccactgcgccatccttcccttcacccacccggaaccctgaggtgagaacgcccaagtcagcaactcagccacaaacaacagaaactaatctccaaactgctcctaaactttctacatctacatccaccactgggacaagccatcttgtaaaatgtgcggagaaggagaaaactttctgtgtgaatggaggggagtgcttcatggtgaaagacctttcaaacccctcgagatacttgtgcaagtgcccaaatgagtttactggtgatcgctgccaaaactacgtaatggccagcttctacagtacgtccactccctttctgtctctgcctgaataggagcatgctcagttggtgctgctttcttgttgctgcatctcccctcagattccacctagagctagatgtgtcttaccagatctaatattgactgcctctgcctgtcgcatgagaacattaacaaaagcaattgtattacttcctctgttcgcgactagttggctctgagatactaataggtgtgtgaggctccggatgtttctggaattgatattgaatgatgtgatacaaattgatagtcaatatcaagcagtgaaatatgataataaaggcatttcaaagtctcacttttattgataaaataaaaatcattctactgaacagtccatcttctttatacaatgaccacatcctgaaaagggtgttgctaagctgtaaccgatatgcacttgaaatgatggtaagttaattttgattcagaatgtgttatttgtcacaaataaacataataaaaggagttcagatgtttttcttcattaaccaaaaaaaaaaaaaaa

SEQ ID NO: 13 - DNA, 1987 bp, Homo sapiens
tttttttttttgcccttatacctcttcgcctttctgtggttccatccacttcttccccctcctcctcccataaacaactctcctacccctgcacccccaataaataaataaaaggaggagggcaaggggggaggaggaggagtggtgctgcgaggggaaggaaaagggaggcagcgcgagagagccgggcagagtccgaaccgacagccagaagcccgcacgcacctcgcaccatgagatggcgacgcgccccgcgccgctccgggcgtcccggcccccgggcccagcgccccggctccgccgcccgctcgtcgccgccgctgccgctgctgccactactgctgctgctggggaccgcggccctggcgccgggggcggcggccggcaacgaggcggctcccgcgggggcctcggtgtgctactcgtccccgcccagcgtgggatcggtgcaggagctagctcagcgcgccgcggtggtgatcgagggaaaggtgcacccgcagcggcggcagcagggggcactcgacaggaaggcggcggcggcggcgggcgaggcaggggcgtggggcggcgatcgcgagccgccagccgcgggcccacgggcgctggggccgcccgccgaggagccgctgctcgccgccaacgggaccgtgccctcttggcccaccgccccggtgcccagcgccggcgagcccggggaggaggcgccctatctggtgaaggtgcaccaggtgtgggcggtgaaagccgggggcttgaagaaggactcgctgctcaccgtgcgcctggggacctggggccaccccgccttcccctcctgcgggaggctcaaggaggacagcaggtacatcttcttcatggagcccgacgccaacagcaccagccgcgcgccggccgccttccgagcctctttcccccctctggagacgggccggaacctcaagaaggaggtcagccgggtgctgtgcaagcggtgcgccttgcctccccgattgaaagagatgaaaagccaggaatcggctgcaggttccaaactagtccttcggtgtgaaaccagttctgaatactcctctctcagattcaagtggttcaagaatgggaatgaattgaatcgaaaaaacaaaccacaaaatatcaagatacaaaaaaagccagggaagtcagaacttcgcattaacaaagcatcactggctgattctggagagtatatgtgcaaagtgatcagcaaattaggaaatgacagtgcctctgccaatatcaccatcgtggaatcaaacgctacatctacatccaccactgggacaagccatcttgtaaaatgtgcggagaaggagaaaactttctgtgtgaatggaggggagtgcttcatggtgaaagacctttcaaacccctcgagatacttgtgcaagtgcccaaatgagtttactggtgatcgctgccaaaactacgtaatggccagcttctacagtacgtccactccctttctgtctctgcctgaataggagcatgctcagttggtgctgctttcttgttgctgcatctcccctcagattccacctagagctagatgtgtcttaccagatctaatattgactgcctctgcctgtcgcatgagaacattaacaaaagcaattgtattacttcctctgttcgcgactagttggctctgagatactaataggtgtgtgaggctccggatgtttctggaattgatattgaatgatgtgatacaaattgatagtcaatatcaagcagtgaaatatgataataaaggcatttcaaagtctcacttttattgataaaataaaaatcattctactgaacagtccatcttctttatacaatgaccacatcctgaaaagggtgttgctaagctgtaaccgatatgcacttgaaatgatggtaagttaattttgattcagaatgtgttatttgtcacaaataaacataataaaaggagttcagatgtttttcttcattaaccaaa

SEQ ID NO: 14 - DNA, 1592 bp, Homo sapiens
gaggccaggggagggtgcgaaggaggcgcctgcctccaacctgcgggcgggaggtgggtggctgcggggcaattgaaaaagagccggcgaggagttccccgaaacttgttggaactccgggctcgcgcggaggccaggagctgagcggcggcggctgccggacgatgggagcgtgagcaggacggtgataacctctccccgatcgggttgcgagggcgccgggcagaggccaggacgcgagccgccagcggtgggacccatcgacgacttcccggggcgacaggagcagccccgagagccagggcgagcgcccgttccaggtggccggaccgcccgccgcgtccgcgccgcgctccctgcaggcaacgggagacgcccccgcgcagcgcgagcgcctcagcgcggccgctcgctctccccctcgagggacaaacttttcccaaacccgatccgagcccttggaccaaactcgcctgcgccgagagccgtccgcgtagagcgctccgtctccggcgagatgtccgagcgcaaagaaggcagaggcaaagggaagggcaagaagaaggagcgaggctccggcaagaagccggagtccgcggcgggcagccagagcccagccttgcctccccgattgaaagagatgaaaagccaggaatcggctgcaggttccaaactagtccttcggtgtgaaaccagttctgaatactcctctctcagattcaagtggttcaagaatgggaatgaattgaatcgaaaaaacaaaccacaaaatatcaagatacaaaaaaagccagggaagtcagaacttcgcattaacaaagcatcactggctgattctggagagtatatgtgcaaagtgatcagcaaattaggaaatgacagtgcctctgccaatatcaccatcgtggaatcaaacgctacatctacatccaccactgggacaagccatcttgtaaaatgtgcggagaaggagaaaactttctgtgtgaatggaggggagtgcttcatggtgaaagacctttcaaacccctcgagatacttgtgcaagtaagaaaagaaatcctgtgtgtcgcttatgtctataactccttgtttcagatgattctatgtctcatgatgtattgttgctttttttccaattttgttgcatcatgttgaataatgctgttttatatgtagagtgttttaaaacattcacaccattcgtcatcactcctctgtcatatgcagaattgttttttgctcttttcaatgtgtgtgaggtgttttttgtttttgtttttgttttttgccatgttatttatagtgttgctttccttgtggtttttcttgttgttattcagaaaagatgtgcagatatcacagaggcctataacttttggtatctacttctacatccaatgtatgaattaagctgtaagataatgttgctttcttatcccagtgatcacctgccaaatgaataagacaacaaagagaagcagaagggcagaagattatttactgacatatatctattacacttgggattgtcttactgttgcataactattttttaaacggagtttagttttatattgctagtaaaaaaa

SEQ ID NO: 15 - DNA, 3211 bp, Homo sapiens
gaggccaggggagggtgcgaaggaggcgcctgcctccaacctgcgggcgggaggtgggtggctgcggggcaattgaaaaagagccggcgaggagttccccgaaacttgttggaactccgggctcgcgcggaggccaggagctgagcggcggcggctgccggacgatgggagcgtgagcaggacggtgataacctctccccgatcgggttgcgagggcgccgggcagaggccaggacgcgagccgccagcggtgggacccatcgacgacttcccggggcgacaggagcagccccgagagccagggcgagcgcccgttccaggtggccggaccgcccgccgcgtccgcgccgcgctccctgcaggcaacgggagacgcccccgcgcagcgcgagcgcctcagcgcggccgctcgctctccccctcgagggacaaacttttcccaaacccgatccgagcccttggaccaaactcgcctgcgccgagagccgtccgcgtagagcgctccgtctccggcgagatgtccgagcgcaaagaaggcagaggcaaagggaagggcaagaagaaggagcgaggctccggcaagaagccggagtccgcggcgggcagccagagcccagccttgcctccccgattgaaagagatgaaaagccaggaatcggctgcaggttccaaactagtccttcggtgtgaaaccagttctgaatactcctctctcagattcaagtggttcaagaatgggaatgaattgaatcgaaaaaacaaaccacaaaatatcaagatacaaaaaaagccagggaagtcagaacttcgcattaacaaagcatcactggctgattctggagagtatatgtgcaaagtgatcagcaaattaggaaatgacagtgcctctgccaatatcaccatcgtggaatcaaacgagatcatcactggtatgccagcctcaactgaaggagcatatgtgtcttcagagtctcccattagaatatcagtatccacagaaggagcaaatacttcttcatctacatctacatccaccactgggacaagccatcttgtaaaatgtgcggagaaggagaaaactttctgtgtgaatggaggggagtgcttcatggtgaaagacctttcaaacccctcgagatacttgtgcaagtgcccaaatgagtttactggtgatcgctgccaaaactacgtaatggccagcttctacaaggcggaggagctgtaccagaagagagtgctgaccataaccggcatctgcatcgccctccttgtggtcggcatcatgtgtgtggtggcctactgcaaaaccaagaaacagcggaaaaagctgcatgaccgtcttcggcagagccttcggtctgaacgaaacaatatgatgaacattgccaatgggcctcaccatcctaacccaccccccgagaatgtccagctggtgaatcaatacgtatctaaaaacgtcatctccagtgagcatattgttgagagagaagcagagacatccttttccaccagtcactatacttccacagcccatcactccactactgtcacccagactcctagccacagctggagcaacggacacactgaaagcatcctttccgaaagccactctgtaatcgtgatgtcatccgtagaaaacagtaggcacagcagcccaactgggggcccaagaggacgtcttaatggcacaggaggccctcgtgaatgtaacagcttcctcaggcatgccagagaaacccctgattcctaccgagactctcctcatagtgaaagacataaccttatagctgagctaaggagaaacaaggcacacagatccaaatgcatgcagatccagctatcagcaactcatcttagatcttcttccattccccatttgggcttcattctctaagaccccttggcctttaggaaggtatgtgtcagccatgaccaccccggctcgtatgtcacctgtagatttccacacgccaagctcccccaaatcgcccccttcggaaatgtctccacccgtgtccagcatgacggtgtccatgccttccatggcggtcagccccttcatggaagaagagagacctctacttctcgtgacaccaccaaggctgcgggagaagaagtttgaccatcaccctcagcagttcagctccttccaccacaaccccgcgcatgacagtaacagcctccctgctagccccttgaggatagtggaggatgaggagtatgaaacgacccaagagtacgagccagcccaagagcctgttaagaaactcgccaatagccggcgggccaaaagaaccaagcccaatggccacattgctaacagattggaagtggacagcaacacaagctcccagagcagtaactcagagagtgaaacagaagatgaaagagtaggtgaagatacgcctttcctgggcatacagaaccccctggcagccagtcttgaggcaacacctgccttccgcctggctgacagcaggactaacccagcaggccgcttctcgacacaggaagaaatccaggccaggctgtctagtgtaattgctaaccaagaccctattgctgtataaaacctaaataaacacatagattcacctgtaaaactttattttatataataaagtattccaccttaaattaaacaatttattttattttagcagttctgcaaatagaaaacaggaaaaaaacttttataaattaaatatatgtatgtaaaaatgtgttatgtgccatatgtagcaattttttacagtatttcaaaacgagaaagatatcaatggtgcctttatgttatgttatgtcgagagcaagttttgtacagttacagtgattgcttttccacagtatttctgcaaaacctctcatagattcagtttttgctggcttcttgtgcattgcattatgatgttgactggatgtatgatttgcaagacttgcaactgtccctctgtttgcttgtagtagcacccgatcagtatgtcttgtaatggcacatccatccagatatgcctctcttgtgtatgaagttttctttgctttcagaatatgaaatgagttgtgtctactctgccagccaaaggtttgcctcattgggctctgagataatagtagatccaacagcatgctactattaaatacagcaagaaactgcattaagtaatgttaaatattaggaagaaagtaatactgtgatttaaaaaaaact

SEQ ID NO: 16 - DNA, 2502 bp, Homo sapiens
gcactcggggcgacagagagggaggaggcgcgcggggacggggacgcccaggaggacccactcgcgggtcccgctccgctccggcagcagcatggggaaaggacgcgcgggccgagttggcaccacagccttgcctccccgattgaaagagatgaaaagccaggaatcggctgcaggttccaaactagtccttcggtgtgaaaccagttctgaatactcctctctcagattcaagtggttcaagaatgggaatgaattgaatcgaaaaaacaaaccacaaaatatcaagatacaaaaaaagccagggaagtcagaacttcgcattaacaaagcatcactggctgattctggagagtatatgtgcaaagtgatcagcaaattaggaaatgacagtgcctctgccaatatcaccatcgtggaatcaaacgctacatctacatccaccactgggacaagccatcttgtaaaatgtgcggagaaggagaaaactttctgtgtgaatggaggggagtgcttcatggtgaaagacctttcaaacccctcgagatacttgtgcaagtgcccaaatgagtttactggtgatcgctgccaaaactacgtaatggccagcttctacaagcatcttgggattgaatttatggaggcggaggagctgtaccagaagagagtgctgaccataaccggcatctgcatcgccctccttgtggtcggcatcatgtgtgtggtggcctactgcaaaaccaagaaacagcggaaaaagctgcatgaccgtcttcggcagagccttcggtctgaacgaaacaatatgatgaacattgccaatgggcctcaccatcctaacccaccccccgagaatgtccagctggtgaatcaatacgtatctaaaaacgtcatctccagtgagcatattgttgagagagaagcagagacatccttttccaccagtcactatacttccacagcccatcactccactactgtcacccagactcctagccacagctggagcaacggacacactgaaagcatcctttccgaaagccactctgtaatcgtgatgtcatccgtagaaaacagtaggcacagcagcccaactgggggcccaagaggacgtcttaatggcacaggaggccctcgtgaatgtaacagcttcctcaggcatgccagagaaacccctgattcctaccgagactctcctcatagtgaaaggtatgtgtcagccatgaccaccccggctcgtatgtcacctgtagatttccacacgccaagctcccccaaatcgcccccttcggaaatgtctccacccgtgtccagcatgacggtgtccatgccttccatggcggtcagccccttcatggaagaagagagacctctacttctcgtgacaccaccaaggctgcgggagaagaagtttgaccatcaccctcagcagttcagctccttccaccacaaccccgcgcatgacagtaacagcctccctgctagccccttgaggatagtggaggatgaggagtatgaaacgacccaagagtacgagccagcccaagagcctgttaagaaactcgccaatagccggcgggccaaaagaaccaagcccaatggccacattgctaacagattggaagtggacagcaacacaagctcccagagcagtaactcagagagtgaaacagaagatgaaagagtaggtgaagatacgcctttcctgggcatacagaaccccctggcagccagtcttgaggcaacacctgccttccgcctggctgacagcaggactaacccagcaggccgcttctcgacacaggaagaaatccaggccaggctgtctagtgtaattgctaaccaagaccctattgctgtataaaacctaaataaacacatagattcacctgtaaaactttattttatataataaagtattccaccttaaattaaacaatttattttattttagcagttctgcaaatagaaaacaggaaaaaaacttttataaattaaatatatgtatgtaaaaatgtgttatgtgccatatgtagcaattttttacagtatttcaaaacgagaaagatatcaatggtgcctttatgttatgttatgtcgagagcaagttttgtacagttacagtgattgcttttccacagtatttctgcaaaacctctcatagattcagtttttgctggcttcttgtgcattgcattatgatgttgactggatgtatgatttgcaagacttgcaactgtccctctgtttgcttgtagtagcacccgatcagtatgtcttgtaatggcacatccatccagatatgcctctcttgtgtatgaagttttctttgctttcagaatatgaaatgagttgtgtctactctgccagccaaaggtttgcctcattgggctctgagataatagtagatccaacagcatgctactattaaatacagcaagaaactgcattaagtaatgttaaatattaggaagaaagtaatactgtgatttaaaaaaaact

SEQ ID NO: 17 - DNA, 2411 bp, Homo sapiens
ctctttctgctcagcttctgctccagagcttcatcttcaggaaccacctaagcatttttttccccagtaggagttcagtctgctcattatacctaattgcaaaggagctatattcagagcaagaataataatttcagattttttaactggacttcaaagagcaggaaagtatgcagattcctaaacacataagcattgaagatattacagctacatctacatccaccactgggacaagccatcttgtaaaatgtgcggagaaggagaaaactttctgtgtgaatggaggggagtgcttcatggtgaaagacctttcaaacccctcgagatacttgtgcaagtgccaacctggattcactggagcaagatgtactgagaatgtgcccatgaaagtccaaaaccaagaaaaggcggaggagctgtaccagaagagagtgctgaccataaccggcatctgcatcgccctccttgtggtcggcatcatgtgtgtggtggcctactgcaaaaccaagaaacagcggaaaaagctgcatgaccgtcttcggcagagccttcggtctgaacgaaacaatatgatgaacattgccaatgggcctcaccatcctaacccaccccccgagaatgtccagctggtgaatcaatacgtatctaaaaacgtcatctccagtgagcatattgttgagagagaagcagagacatccttttccaccagtcactatacttccacagcccatcactccactactgtcacccagactcctagccacagctggagcaacggacacactgaaagcatcctttccgaaagccactctgtaatcgtgatgtcatccgtagaaaacagtaggcacagcagcccaactgggggcccaagaggacgtcttaatggcacaggaggccctcgtgaatgtaacagcttcctcaggcatgccagagaaacccctgattcctaccgagactctcctcatagtgaaagacataaccttatagctgagctaaggagaaacaaggcacacagatccaaatgcatgcagatccagctatcagcaactcatcttagatcttcttccattccccatttgggcttcattctctaagaccccttggcctttaggaaggtatgtgtcagccatgaccaccccggctcgtatgtcacctgtagatttccacacgccaagctcccccaaatcgcccccttcggaaatgtctccacccgtgtccagcatgacggtgtccatgccttccatggcggtcagccccttcatggaagaagagagacctctacttctcgtgacaccaccaaggctgcgggagaagaagtttgaccatcaccctcagcagttcagctccttccaccacaaccccgcgcatgacagtaacagcctccctgctagccccttgaggatagtggaggatgaggagtatgaaacgacccaagagtacgagccagcccaagagcctgttaagaaactcgccaatagccggcgggccaaaagaaccaagcccaatggccacattgctaacagattggaagtggacagcaacacaagctcccagagcagtaactcagagagtgaaacagaagatgaaagagtaggtgaagatacgcctttcctgggcatacagaaccccctggcagccagtcttgaggcaacacctgccttccgcctggctgacagcaggactaacccagcaggccgcttctcgacacaggaagaaatccaggccaggctgtctagtgtaattgctaaccaagaccctattgctgtataaaacctaaataaacacatagattcacctgtaaaactttattttatataataaagtattccaccttaaattaaacaatttattttattttagcagttctgcaaatagaaaacaggaaaaaaacttttataaattaaatatatgtatgtaaaaatgtgttatgtgccatatgtagcaattttttacagtatttcaaaacgagaaagatatcaatggtgcctttatgttatgttatgtcgagagcaagttttgtacagttacagtgattgcttttccacagtatttctgcaaaacctctcatagattcagtttttgctggcttcttgtgcattgcattatgatgttgactggatgtatgatttgcaagacttgcaactgtccctctgtttgcttgtagtagcacccgatcagtatgtcttgtaatggcacatccatccagatatgcctctcttgtgtatgaagttttctttgctttcagaatatgaaatgagttgtgtctactctgccagccaaaggtttgcctcattgggctctgagataatagtagatccaacagcatgctactattaaatacagcaagaaactgcattaagtaatgttaaatattaggaagaaagtaatactgtgatttaaaaaaaact

SEQ ID NO: 18 - DNA, 1740 bp, Homo sapiens
gaggccaggggagggtgcgaaggaggcgcctgcctccaacctgcgggcgggaggtgggtggctgcggggcaattgaaaaagagccggcgaggagttccccgaaacttgttggaactccgggctcgcgcggaggccaggagctgagcggcggcggctgccggacgatgggagcgtgagcaggacggtgataacctctccccgatcgggttgcgagggcgccgggcagaggccaggacgcgagccgccagcggtgggacccatcgacgacttcccggggcgacaggagcagccccgagagccagggcgagcgcccgttccaggtggccggaccgcccgccgcgtccgcgccgcgctccctgcaggcaacgggagacgcccccgcgcagcgcgagcgcctcagcgcggccgctcgctctccccctcgagggacaaacttttcccaaacccgatccgagcccttggaccaaactcgcctgcgccgagagccgtccgcgtagagcgctccgtctccggcgagatgtccgagcgcaaagaaggcagaggcaaagggaagggcaagaagaaggagcgaggctccggcaagaagccggagtccgcggcgggcagccagagcccagccttgcctccccgattgaaagagatgaaaagccaggaatcggctgcaggttccaaactagtccttcggtgtgaaaccagttctgaatactcctctctcagattcaagtggttcaagaatgggaatgaattgaatcgaaaaaacaaaccacaaaatatcaagatacaaaaaaagccagggaagtcagaacttcgcattaacaaagcatcactggctgattctggagagtatatgtgcaaagtgatcagcaaattaggaaatgacagtgcctctgccaatatcaccatcgtggaatcaaacgagatcatcactggtatgccagcctcaactgaaggagcatatgtgtcttcagagtctcccattagaatatcagtatccacagaaggagcaaatacttcttcatctacatctacatccaccactgggacaagccatcttgtaaaatgtgcggagaaggagaaaactttctgtgtgaatggaggggagtgcttcatggtgaaagacctttcaaacccctcgagatacttgtgcaagtgcccaaatgagtttactggtgatcgctgccaaaactacgtaatggccagcttctacagtacgtccactccctttctgtctctgcctgaataggagcatgctcagttggtgctgctttcttgttgctgcatctcccctcagattccacctagagctagatgtgtcttaccagatctaatattgactgcctctgcctgtcgcatgagaacattaacaaaagcaattgtattacttcctctgttcgcgactagttggctctgagatactaataggtgtgtgaggctccggatgtttctggaattgatattgaatgatgtgatacaaattgatagtcaatatcaagcagtgaaatatgataataaaggcatttcaaagtctcacttttattgataaaataaaaatcattctactgaacagtccatcttctttatacaatgaccacatcctgaaaagggtgttgctaagctgtaaccgatatgcacttgaaatgatggtaagttaattttgattcagaatgtgttatttgtcacaaataaacataataaaaggagttcagatgtttttcttcattaaccaaaaaaaaaaaaaaa

SEQ ID NO: 19 - DNA, 3093 bp, Homo sapiens
gaggccaggggagggtgcgaaggaggcgcctgcctccaacctgcgggcgggaggtgggtggctgcggggcaattgaaaaagagccggcgaggagttccccgaaacttgttggaactccgggctcgcgcggaggccaggagctgagcggcggcggctgccggacgatgggagcgtgagcaggacggtgataacctctccccgatcgggttgcgagggcgccgggcagaggccaggacgcgagccgccagcggtgggacccatcgacgacttcccggggcgacaggagcagccccgagagccagggcgagcgcccgttccaggtggccggaccgcccgccgcgtccgcgccgcgctccctgcaggcaacgggagacgcccccgcgcagcgcgagcgcctcagcgcggccgctcgctctccccctcgagggacaaacttttcccaaacccgatccgagcccttggaccaaactcgcctgcgccgagagccgtccgcgtagagcgctccgtctccggcgagatgtccgagcgcaaagaaggcagaggcaaagggaagggcaagaagaaggagcgaggctccggcaagaagccggagtccgcggcgggcagccagagcccagccttgcctccccgattgaaagagatgaaaagccaggaatcggctgcaggttccaaactagtccttcggtgtgaaaccagttctgaatactcctctctcagattcaagtggttcaagaatgggaatgaattgaatcgaaaaaacaaaccacaaaatatcaagatacaaaaaaagccagggaagtcagaacttcgcattaacaaagcatcactggctgattctggagagtatatgtgcaaagtgatcagcaaattaggaaatgacagtgcctctgccaatatcaccatcgtggaatcaaacgagatcatcactggtatgccagcctcaactgaaggagcatatgtgtcttcagagtctcccattagaatatcagtatccacagaaggagcaaatacttcttcatctacatctacatccaccactgggacaagccatcttgtaaaatgtgcggagaaggagaaaactttctgtgtgaatggaggggagtgcttcatggtgaaagacctttcaaacccctcgagatacttgtgcaagtgcccaaatgagtttactggtgatcgctgccaaaactacgtaatggccagcttctacaagcatcttgggattgaatttatggaggcggaggagctgtaccagaagagagtgctgaccataaccggcatctgcatcgccctccttgtggtcggcatcatgtgtgtggtggcctactgcaaaaccaagaaacagcggaaaaagctgcatgaccgtcttcggcagagccttcggtctgaacgaaacaatatgatgaacattgccaatgggcctcaccatcctaacccaccccccgagaatgtccagctggtgaatcaatacgtatctaaaaacgtcatctccagtgagcatattgttgagagagaagcagagacatccttttccaccagtcactatacttccacagcccatcactccactactgtcacccagactcctagccacagctggagcaacggacacactgaaagcatcctttccgaaagccactctgtaatcgtgatgtcatccgtagaaaacagtaggcacagcagcccaactgggggcccaagaggacgtcttaatggcacaggaggccctcgtgaatgtaacagcttcctcaggcatgccagagaaacccctgattcctaccgagactctcctcatagtgaaaggtatgtgtcagccatgaccaccccggctcgtatgtcacctgtagatttccacacgccaagctcccccaaatcgcccccttcggaaatgtctccacccgtgtccagcatgacggtgtccatgccttccatggcggtcagccccttcatggaagaagagagacctctacttctcgtgacaccaccaaggctgcgggagaagaagtttgaccatcaccctcagcagttcagctccttccaccacaaccccgcgcatgacagtaacagcctccctgctagccccttgaggatagtggaggatgaggagtatgaaacgacccaagagtacgagccagcccaagagcctgttaagaaactcgccaatagccggcgggccaaaagaaccaagcccaatggccacattgctaacagattggaagtggacagcaacacaagctcccagagcagtaactcagagagtgaaacagaagatgaaagagtaggtgaagatacgcctttcctgggcatacagaaccccctggcagccagtcttgaggcaacacctgccttccgcctggctgacagcaggactaacccagcaggccgcttctcgacacaggaagaaatccaggccaggctgtctagtgtaattgctaaccaagaccctattgctgtataaaacctaaataaacacatagattcacctgtaaaactttattttatataataaagtattccaccttaaattaaacaatttattttattttagcagttctgcaaatagaaaacaggaaaaaaacttttataaattaaatatatgtatgtaaaaatgtgttatgtgccatatgtagcaattttttacagtatttcaaaacgagaaagatatcaatggtgcctttatgttatgttatgtcgagagcaagttttgtacagttacagtgattgcttttccacagtatttctgcaaaacctctcatagattcagtttttgctggcttcttgtgcattgcattatgatgttgactggatgtatgatttgcaagacttgcaactgtccctctgtttgcttgtagtagcacccgatcagtatgtcttgtaatggcacatccatccagatatgcctctcttgtgtatgaagttttctttgctttcagaatatgaaatgagttgtgtctactctgccagccaaaggtttgcctcattgggctctgagataatagtagatccaacagcatgctactattaaatacagcaagaaactgcattaagtaatgttaaatattaggaagaaagtaatactgtgatttaaaaaaaact

SEQ ID NO: 20 - DNA, 3078 bp, Homo sapiens
gaggccaggggagggtgcgaaggaggcgcctgcctccaacctgcgggcgggaggtgggtggctgcggggcaattgaaaaagagccggcgaggagttccccgaaacttgttggaactccgggctcgcgcggaggccaggagctgagcggcggcggctgccggacgatgggagcgtgagcaggacggtgataacctctccccgatcgggttgcgagggcgccgggcagaggccaggacgcgagccgccagcggtgggacccatcgacgacttcccggggcgacaggagcagccccgagagccagggcgagcgcccgttccaggtggccggaccgcccgccgcgtccgcgccgcgctccctgcaggcaacgggagacgcccccgcgcagcgcgagcgcctcagcgcggccgctcgctctccccctcgagggacaaacttttcccaaacccgatccgagcccttggaccaaactcgcctgcgccgagagccgtccgcgtagagcgctccgtctccggcgagatgtccgagcgcaaagaaggcagaggcaaagggaagggcaagaagaaggagcgaggctccggcaagaagccggagtccgcggcgggcagccagagcccagccttgcctccccgattgaaagagatgaaaagccaggaatcggctgcaggttccaaactagtccttcggtgtgaaaccagttctgaatactcctctctcagattcaagtggttcaagaatgggaatgaattgaatcgaaaaaacaaaccacaaaatatcaagatacaaaaaaagccagggaagtcagaacttcgcattaacaaagcatcactggctgattctggagagtatatgtgcaaagtgatcagcaaattaggaaatgacagtgcctctgccaatatcaccatcgtggaatcaaacgagatcatcactggtatgccagcctcaactgaaggagcatatgtgtcttcagagtctcccattagaatatcagtatccacagaaggagcaaatacttcttcatctacatctacatccaccactgggacaagccatcttgtaaaatgtgcggagaaggagaaaactttctgtgtgaatggaggggagtgcttcatggtgaaagacctttcaaacccctcgagatacttgtgcaagtgccaacctggattcactggagcaagatgtactgagaatgtgcccatgaaagtccaaaaccaagaaaaggcggaggagctgtaccagaagagagtgctgaccataaccggcatctgcatcgccctccttgtggtcggcatcatgtgtgtggtggcctactgcaaaaccaagaaacagcggaaaaagctgcatgaccgtcttcggcagagccttcggtctgaacgaaacaatatgatgaacattgccaatgggcctcaccatcctaacccaccccccgagaatgtccagctggtgaatcaatacgtatctaaaaacgtcatctccagtgagcatattgttgagagagaagcagagacatccttttccaccagtcactatacttccacagcccatcactccactactgtcacccagactcctagccacagctggagcaacggacacactgaaagcatcctttccgaaagccactctgtaatcgtgatgtcatccgtagaaaacagtaggcacagcagcccaactgggggcccaagaggacgtcttaatggcacaggaggccctcgtgaatgtaacagcttcctcaggcatgccagagaaacccctgattcctaccgagactctcctcatagtgaaaggtatgtgtcagccatgaccaccccggctcgtatgtcacctgtagatttccacacgccaagctcccccaaatcgcccccttcggaaatgtctccacccgtgtccagcatgacggtgtccatgccttccatggcggtcagccccttcatggaagaagagagacctctacttctcgtgacaccaccaaggctgcgggagaagaagtttgaccatcaccctcagcagttcagctccttccaccacaaccccgcgcatgacagtaacagcctccctgctagccccttgaggatagtggaggatgaggagtatgaaacgacccaagagtacgagccagcccaagagcctgttaagaaactcgccaatagccggcgggccaaaagaaccaagcccaatggccacattgctaacagattggaagtggacagcaacacaagctcccagagcagtaactcagagagtgaaacagaagatgaaagagtaggtgaagatacgcctttcctgggcatacagaaccccctggcagccagtcttgaggcaacacctgccttccgcctggctgacagcaggactaacccagcaggccgcttctcgacacaggaagaaatccaggccaggctgtctagtgtaattgctaaccaagaccctattgctgtataaaacctaaataaacacatagattcacctgtaaaactttattttatataataaagtattccaccttaaattaaacaatttattttattttagcagttctgcaaatagaaaacaggaaaaaaacttttataaattaaatatatgtatgtaaaaatgtgttatgtgccatatgtagcaattttttacagtatttcaaaacgagaaagatatcaatggtgcctttatgttatgttatgtcgagagcaagttttgtacagttacagtgattgcttttccacagtatttctgcaaaacctctcatagattcagtttttgctggcttcttgtgcattgcattatgatgttgactggatgtatgatttgcaagacttgcaactgtccctctgtttgcttgtagtagcacccgatcagtatgtcttgtaatggcacatccatccagatatgcctctcttgtgtatgaagttttctttgctttcagaatatgaaatgagttgtgtctactctgccagccaaaggtttgcctcattgggctctgagataatagtagatccaacagcatgctactattaaatacagcaagaaactgcattaagtaatgttaaatattaggaagaaagtaatactgtgatttaaaaaaaact

SEQ ID NO: 21 - DNA, 3220 bp, Homo sapiens
gaggccaggggagggtgcgaaggaggcgcctgcctccaacctgcgggcgggaggtgggtggctgcggggcaattgaaaaagagccggcgaggagttccccgaaacttgttggaactccgggctcgcgcggaggccaggagctgagcggcggcggctgccggacgatgggagcgtgagcaggacggtgataacctctccccgatcgggttgcgagggcgccgggcagaggccaggacgcgagccgccagcggtgggacccatcgacgacttcccggggcgacaggagcagccccgagagccagggcgagcgcccgttccaggtggccggaccgcccgccgcgtccgcgccgcgctccctgcaggcaacgggagacgcccccgcgcagcgcgagcgcctcagcgcggccgctcgctctccccctcgagggacaaacttttcccaaacccgatccgagcccttggaccaaactcgcctgcgccgagagccgtccgcgtagagcgctccgtctccggcgagatgtccgagcgcaaagaaggcagaggcaaagggaagggcaagaagaaggagcgaggctccggcaagaagccggagtccgcggcgggcagccagagcccagccttgcctccccgattgaaagagatgaaaagccaggaatcggctgcaggttccaaactagtccttcggtgtgaaaccagttctgaatactcctctctcagattcaagtggttcaagaatgggaatgaattgaatcgaaaaaacaaaccacaaaatatcaagatacaaaaaaagccagggaagtcagaacttcgcattaacaaagcatcactggctgattctggagagtatatgtgcaaagtgatcagcaaattaggaaatgacagtgcctctgccaatatcaccatcgtggaatcaaacgagatcatcactggtatgccagcctcaactgaaggagcatatgtgtcttcagagtctcccattagaatatcagtatccacagaaggagcaaatacttcttcatctacatctacatccaccactgggacaagccatcttgtaaaatgtgcggagaaggagaaaactttctgtgtgaatggaggggagtgcttcatggtgaaagacctttcaaacccctcgagatacttgtgcaagtgccaacctggattcactggagcaagatgtactgagaatgtgcccatgaaagtccaaaaccaagaaaaggcggaggagctgtaccagaagagagtgctgaccataaccggcatctgcatcgccctccttgtggtcggcatcatgtgtgtggtggcctactgcaaaaccaagaaacagcggaaaaagctgcatgaccgtcttcggcagagccttcggtctgaacgaaacaatatgatgaacattgccaatgggcctcaccatcctaacccaccccccgagaatgtccagctggtgaatcaatacgtatctaaaaacgtcatctccagtgagcatattgttgagagagaagcagagacatccttttccaccagtcactatacttccacagcccatcactccactactgtcacccagactcctagccacagctggagcaacggacacactgaaagcatcctttccgaaagccactctgtaatcgtgatgtcatccgtagaaaacagtaggcacagcagcccaactgggggcccaagaggacgtcttaatggcacaggaggccctcgtgaatgtaacagcttcctcaggcatgccagagaaacccctgattcctaccgagactctcctcatagtgaaagacataaccttatagctgagctaaggagaaacaaggcacacagatccaaatgcatgcagatccagctatcagcaactcatcttagatcttcttccattccccatttgggcttcattctctaagaccccttggcctttaggaaggtatgtgtcagccatgaccaccccggctcgtatgtcacctgtagatttccacacgccaagctcccccaaatcgcccccttcggaaatgtctccacccgtgtccagcatgacggtgtccatgccttccatggcggtcagccccttcatggaagaagagagacctctacttctcgtgacaccaccaaggctgcgggagaagaagtttgaccatcaccctcagcagttcagctccttccaccacaaccccgcgcatgacagtaacagcctccctgctagccccttgaggatagtggaggatgaggagtatgaaacgacccaagagtacgagccagcccaagagcctgttaagaaactcgccaatagccggcgggccaaaagaaccaagcccaatggccacattgctaacagattggaagtggacagcaacacaagctcccagagcagtaactcagagagtgaaacagaagatgaaagagtaggtgaagatacgcctttcctgggcatacagaaccccctggcagccagtcttgaggcaacacctgccttccgcctggctgacagcaggactaacccagcaggccgcttctcgacacaggaagaaatccaggccaggctgtctagtgtaattgctaaccaagaccctattgctgtataaaacctaaataaacacatagattcacctgtaaaactttattttatataataaagtattccaccttaaattaaacaatttattttattttagcagttctgcaaatagaaaacaggaaaaaaacttttataaattaaatatatgtatgtaaaaatgtgttatgtgccatatgtagcaattttttacagtatttcaaaacgagaaagatatcaatggtgcctttatgttatgttatgtcgagagcaagttttgtacagttacagtgattgcttttccacagtatttctgcaaaacctctcatagattcagtttttgctggcttcttgtgcattgcattatgatgttgactggatgtatgatttgcaagacttgcaactgtccctctgtttgcttgtagtagcacccgatcagtatgtcttgtaatggcacatccatccagatatgcctctcttgtgtatgaagttttctttgctttcagaatatgaaatgagttgtgtctactctgccagccaaaggtttgcctcattgggctctgagataatagtagatccaacagcatgctactattaaatacagcaagaaactgcattaagtaatgttaaatattaggaagaaagtaatactgtgatttaaaaaaaact

SEQ ID NO: 22 - DNA, 3677 bp, Homo sapiens
tcgcggaggcttggggcagccgggtagctcggaggtcgtggcgctgggggctagcaccagcgctctgtcgggaggcgcagcggttaggtggaccggtcagcggactcaccggccagggcgctcggtgctggaatttgatattcattgatccgggttttatccctcttcttttttcttaaacatttttttttaaaactgtattgtttctcgttttaatttatttttgcttgccattccccacttgaatcgggccgacggcttggggagattgctctacttccccaaatcactgtggattttggaaaccagcagaaagaggaaagaggtagcaagagctccagagagaagtcgaggaagagagagacggggtcagagagagcgcgcgggcgtgcgagcagcgaaagcgacaggggcaaagtgagtgacctgcttttgggggtgaccgccggagcgcggcgtgagccctcccccttgggatcccgcagctgaccagtcgcgctgacggacagacagacagacaccgcccccagccccagctaccacctcctccccggccggcggcggacagtggacgcggcggcgagccgcgggcaggggccggagcccgcgcccggaggcggggtggagggggtcggggctcgcggcgtcgcactgaaacttttcgtccaacttctgggctgttctcgcttcggaggagccgtggtccgcgcgggggaagccgagccgagcggagccgcgagaagtgctagctcgggccgggaggagccgcagccggaggagggggaggaggaagaagagaaggaagaggagagggggccgcagtggcgactcggcgctcggaagccgggctcatggacgggtgaggcggcggtgtgcgcagacagtgctccagccgcgcgcgctccccaggccctggcccgggcctcgggccggggaggaagagtagctcgccgaggcgccgaggagagcgggccgccccacagcccgagccggagagggagcgcgagccgcgccggccccggtcgggcctccgaaaccatgaactttctgctgtcttgggtgcattggagccttgccttgctgctctacctccaccatgccaagtggtcccaggctgcacccatggcagaaggaggagggcagaatcatcacgaagtggtgaagttcatggatgtctatcagcgcagctactgccatccaatcgagaccctggtggacatcttccaggagtaccctgatgagatcgagtacatcttcaagccatcctgtgtgcccctgatgcgatgcgggggctgctgcaatgacgagggcctggagtgtgtgcccactgaggagtccaacatcaccatgcagattatgcggatcaaacctcaccaaggccagcacataggagagatgagcttcctacagcacaacaaatgtgaatgcagaccaaagaaagatagagcaagacaagaaaaaaaatcagttcgaggaaagggaaaggggcaaaaacgaaagcgcaagaaatcccggtataagtcctggagcgtgtacgttggtgcccgctgctgtctaatgccctggagcctccctggcccccatccctgtgggccttgctcagagcggagaaagcatttgtttgtacaagatccgcagacgtgtaaatgttcctgcaaaaacacagactcgcgttgcaaggcgaggcagcttgagttaaacgaacgtacttgcagatgtgacaagccgaggcggtgagccgggcaggaggaaggagcctccctcagggtttcgggaaccagatctctcaccaggaaagactgatacagaacgatcgatacagaaaccacgctgccgccaccacaccatcaccatcgacagaacagtccttaatccagaaacctgaaatgaaggaagaggagactctgcgcagagcactttgggtccggagggcgagactccggcggaagcattcccgggcgggtgacccagcacggtccctcttggaattggattcgccattttatttttcttgctgctaaatcaccgagcccggaagattagagagttttatttctgggattcctgtagacacacccacccacatacatacatttatatatatatatattatatatatataaaaataaatatctctattttatatatataaaatatatatattctttttttaaattaacagtgctaatgttattggtgtcttcactggatgtatttgactgctgtggacttgagttgggaggggaatgttcccactcagatcctgacagggaagaggaggagatgagagactctggcatgatcttttttttgtcccacttggtggggccagggtcctctcccctgcccaggaatgtgcaaggccagggcatgggggcaaatatgacccagttttgggaacaccgacaaacccagccctggcgctgagcctctctaccccaggtcagacggacagaaagacagatcacaggtacagggatgaggacaccggctctgaccaggagtttggggagcttcaggacattgctgtgctttggggattccctccacatgctgcacgcgcatctcgcccccaggggcactgcctggaagattcaggagcctgggcggccttcgcttactctcacctgcttctgagttgcccaggagaccactggcagatgtcccggcgaagagaagagacacattgttggaagaagcagcccatgacagctccccttcctgggactcgccctcatcctcttcctgctccccttcctggggtgcagcctaaaaggacctatgtcctcacaccattgaaaccactagttctgtccccccaggagacctggttgtgtgtgtgtgagtggttgaccttcctccatcccctggtccttcccttcccttcccgaggcacagagagacagggcaggatccacgtgcccattgtggaggcagagaaaagagaaagtgttttatatacggtacttatttaatatccctttttaattagaaattaaaacagttaatttaattaaagagtagggttttttttcagtattcttggttaatatttaatttcaactatttatgagatgtatcttttgctctctcttgctctcttatttgtaccggtttttgtatataaaattcatgtttccaatctctctctccctgatcggtgacagtcactagcttatcttgaacagatatttaattttgctaacactcagctctgccctccccgatcccctggctccccagcacacattcctttgaaataaggtttcaatatacatctacatactatatatatatttggcaacttgtatttgtgtgtatatatatatatatatgtttatgtatatatgtgattctgataaaatagacattgctattctgttttttatatgtaaaaacaaaacaagaaaaaatagagaattctacatactaaatctctctccttttttaattttaatatttgttatcatttatttattggtgctactgtttatccgtaataattgtggggaaaagatattaacatcacgtctttgtctctagtgcagtttttcgagatattccgtagtacatatttatttttaaacaacgacaaagaaatacagatatatcttaaaaaaaaaaaagcattttgtattaaagaatttaattctgatctcaaaaaaaaaaaaaaaaaa

SEQ ID NO: 23 - DNA, 3677 bp, Homo sapiens; identical to SEQ ID NO: 22

SEQ ID NO: 24 - DNA, 3626 bp, Homo sapiens
tcgcggaggcttggggcagccgggtagctcggaggtcgtggcgctgggggctagcaccagcgctctgtcgggaggcgcagcggttaggtggaccggtcagcggactcaccggccagggcgctcggtgctggaatttgatattcattgatccgggttttatccctcttcttttttcttaaacatttttttttaaaactgtattgtttctcgttttaatttatttttgcttgccattccccacttgaatcgggccgacggcttggggagattgctctacttccccaaatcactgtggattttggaaaccagcagaaagaggaaagaggtagcaagagctccagagagaagtcgaggaagagagagacggggtcagagagagcgcgcgggcgtgcgagcagcgaaagcgacaggggcaaagtgagtgacctgcttttgggggtgaccgccggagcgcggcgtgagccctcccccttgggatcccgcagctgaccagtcgcgctgacggacagacagacagacaccgcccccagccccagctaccacctcctccccggccggcggcggacagtggacgcggcggcgagccgcgggcaggggccggagcccgcgcccggaggcggggtggagggggtcggggctcgcggcgtcgcactgaaacttttcgtccaacttctgggctgttctcgcttcggaggagccgtggtccgcgcgggggaagccgagccgagcggagccgcgagaagtgctagctcgggccgggaggagccgcagccggaggagggggaggaggaagaagagaaggaagaggagagggggccgcagtggcgactcggcgctcggaagccgggctcatggacgggtgaggcggcggtgtgcgcagacagtgctccagccgcgcgcgctccccaggccctggcccgggcctcgggccggggaggaagagtagctcgccgaggcgccgaggagagcgggccgccccacagcccgagccggagagggagcgcgagccgcgccggccccggtcgggcctccgaaaccatgaactttctgctgtcttgggtgcattggagccttgccttgctgctctacctccaccatgccaagtggtcccaggctgcacccatggcagaaggaggagggcagaatcatcacgaagtggtgaagttcatggatgtctatcagcgcagctactgccatccaatcgagaccctggtggacatcttccaggagtaccctgatgagatcgagtacatcttcaagccatcctgtgtgcccctgatgcgatgcgggggctgctgcaatgacgagggcctggagtgtgtgcccactgaggagtccaacatcaccatgcagattatgcggatcaaacctcaccaaggccagcacataggagagatgagcttcctacagcacaacaaatgtgaatgcagaccaaagaaagatagagcaagacaagaaaaaaaatcagttcgaggaaagggaaaggggcaaaaacgaaagcgcaagaaatcccggtataagtcctggagcgttccctgtgggccttgctcagagcggagaaagcatttgtttgtacaagatccgcagacgtgtaaatgttcctgcaaaaacacagactcgcgttgcaaggcgaggcagcttgagttaaacgaacgtacttgcagatgtgacaagccgaggcggtgagccgggcaggaggaaggagcctccctcagggtttcgggaaccagatctctcaccaggaaagactgatacagaacgatcgatacagaaaccacgctgccgccaccacaccatcaccatcgacagaacagtccttaatccagaaacctgaaatgaaggaagaggagactctgcgcagagcactttgggtccggagggcgagactccggcggaagcattcccgggcgggtgacccagcacggtccctcttggaattggattcgccattttatttttcttgctgctaaatcaccgagcccggaagattagagagttttatttctgggattcctgtagacacacccacccacatacatacatttatatatatatatattatatatatataaaaataaatatctctattttatatatataaaatatatatattctttttttaaattaacagtgctaatgttattggtgtcttcactggatgtatttgactgctgtggacttgagttgggaggggaatgttcccactcagatcctgacagggaagaggaggagatgagagactctggcatgatcttttttttgtcccacttggtggggccagggtcctctcccctgcccaggaatgtgcaaggccagggcatgggggcaaatatgacccagttttgggaacaccgacaaacccagccctggcgctgagcctctctaccccaggtcagacggacagaaagacagatcacaggtacagggatgaggacaccggctctgaccaggagtttggggagcttcaggacattgctgtgctttggggattccctccacatgctgcacgcgcatctcgcccccaggggcactgcctggaagattcaggagcctgggcggccttcgcttactctcacctgcttctgagttgcccaggagaccactggcagatgtcccggcgaagagaagagacacattgttggaagaagcagcccatgacagctccccttcctgggactcgccctcatcctcttcctgctccccttcctggggtgcagcctaaaaggacctatgtcctcacaccattgaaaccactagttctgtccccccaggagacctggttgtgtgtgtgtgagtggttgaccttcctccatcccctggtccttcccttcccttcccgaggcacagagagacagggcaggatccacgtgcccattgtggaggcagagaaaagagaaagtgttttatatacggtacttatttaatatccctttttaattagaaattaaaacagttaatttaattaaagagtagggttttttttcagtattcttggttaatatttaatttcaactatttatgagatgtatcttttgctctctcttgctctcttatttgtaccggtttttgtatataaaattcatgtttccaatctctctctccctgatcggtgacagtcactagcttatcttgaacagatatttaattttgctaacactcagctctgccctccccgatcccctggctccccagcacacattcctttgaaataaggtttcaatatacatctacatactatatatatatttggcaacttgtatttgtgtgtatatatatatatatatgtttatgtatatatgtgattctgataaaatagacattgctattctgttttttatatgtaaaaacaaaacaagaaaaaatagagaattctacatactaaatctctctccttttttaattttaatatttgttatcatttatttattggtgctactgtttatccgtaataattgtggggaaaagatattaacatcacgtctttgtctctagtgcagtttttcgagatattccgtagtacatatttatttttaaacaacgacaaagaaatacagatatatcttaaaaaaaaaaaagcattttgtattaaagaatttaattctgatctcaaaaaaaaaaaaaaaaaa

SEQ ID NO: 25 - DNA, 3626 bp, Homo sapiens; identical to SEQ ID NO: 24

SEQ ID NO: 26 - DNA, 3608 bp, Homo sapiens
tcgcggaggcttggggcagccgggtagctcggaggtcgtggcgctgggggctagcaccagcgctctgtcgggaggcgcagcggttaggtggaccggtcagcggactcaccggccagggcgctcggtgctggaatttgatattcattgatccgggttttatccctcttcttttttcttaaacatttttttttaaaactgtattgtttctcgttttaatttatttttgcttgccattccccacttgaatcgggccgacggcttggggagattgctctacttccccaaatcactgtggattttggaaaccagcagaaagaggaaagaggtagcaagagctccagagagaagtcgaggaagagagagacggggtcagagagagcgcgcgggcgtgcgagcagcgaaagcgacaggggcaaagtgagtgacctgcttttgggggtgaccgccggagcgcggcgtgagccctcccccttgggatcccgcagctgaccagtcgcgctgacggacagacagacagacaccgcccccagccccagctaccacctcctccccggccggcggcggacagtggacgcggcggcgagccgcgggcaggggccggagcccgcgcccggaggcggggtggagggggtcggggctcgcggcgtcgcactgaaacttttcgtccaacttctgggctgttctcgcttcggaggagccgtggtccgcgcgggggaagccgagccgagcggagccgcgagaagtgctagctcgggccgggaggagccgcagccggaggagggggaggaggaagaagagaaggaagaggagagggggccgcagtggcgactcggcgctcggaagccgggctcatggacgggtgaggcggcggtgtgcgcagacagtgctccagccgcgcgcgctccccaggccctggcccgggcctcgggccggggaggaagagtagctcgccgaggcgccgaggagagcgggccgccccacagcccgagccggagagggagcgcgagccgcgccggccccggtcgggcctccgaaaccatgaactttctgctgtcttgggtgcattggagccttgccttgctgctctacctccaccatgccaagtggtcccaggctgcacccatggcagaaggaggagggcagaatcatcacgaagtggtgaagttcatggatgtctatcagcgcagctactgccatccaatcgagaccctggtggacatcttccaggagtaccctgatgagatcgagtacatcttcaagccatcctgtgtgcccctgatgcgatgcgggggctgctgcaatgacgagggcctggagtgtgtgcccactgaggagtccaacatcaccatgcagattatgcggatcaaacctcaccaaggccagcacataggagagatgagcttcctacagcacaacaaatgtgaatgcagaccaaagaaagatagagcaagacaagaaaaaaaatcagttcgaggaaagggaaaggggcaaaaacgaaagcgcaagaaatcccgtccctgtgggccttgctcagagcggagaaagcatttgtttgtacaagatccgcagacgtgtaaatgttcctgcaaaaacacagactcgcgttgcaaggcgaggcagcttgagttaaacgaacgtacttgcagatgtgacaagccgaggcggtgagccgggcaggaggaaggagcctccctcagggtttcgggaaccagatctctcaccaggaaagactgatacagaacgatcgatacagaaaccacgctgccgccaccacaccatcaccatcgacagaacagtccttaatccagaaacctgaaatgaaggaagaggagactctgcgcagagcactttgggtccggagggcgagactccggcggaagcattcccgggcgggtgacccagcacggtccctcttggaattggattcgccattttatttttcttgctgctaaatcaccgagcccggaagattagagagttttatttctgggattcctgtagacacacccacccacatacatacatttatatatatatatattatatatatataaaaataaatatctctattttatatatataaaatatatatattctttttttaaattaacagtgctaatgttattggtgtcttcactggatgtatttgactgctgtggacttgagttgggaggggaatgttcccactcagatcctgacagggaagaggaggagatgagagactctggcatgatcttttttttgtcccacttggtggggccagggtcctctcccctgcccaggaatgtgcaaggccagggcatgggggcaaatatgacccagttttgggaacaccgacaaacccagccctggcgctgagcctctctaccccaggtcagacggacagaaagacagatcacaggtacagggatgaggacaccggctctgaccaggagtttggggagcttcaggacattgctgtgctttggggattccctccacatgctgcacgcgcatctcgcccccaggggcactgcctggaagattcaggagcctgggcggccttcgcttactctcacctgcttctgagttgcccaggagaccactggcagatgtcccggcgaagagaagagacacattgttggaagaagcagcccatgacagctccccttcctgggactcgccctcatcctcttcctgctccccttcctggggtgcagcctaaaaggacctatgtcctcacaccattgaaaccactagttctgtccccccaggagacctggttgtgtgtgtgtgagtggttgaccttcctccatcccctggtccttcccttcccttcccgaggcacagagagacagggcaggatccacgtgcccattgtggaggcagagaaaagagaaagtgttttatatacggtacttatttaatatccctttttaattagaaattaaaacagttaatttaattaaagagtagggttttttttcagtattcttggttaatatttaatttcaactatttatgagatgtatcttttgctctctcttgctctcttatttgtaccggtttttgtatataaaattcatgtttccaatctctctctccctgatcggtgacagtcactagcttatcttgaacagatatttaattttgctaacactcagctctgccctccccgatcccctggctccccagcacacattcctttgaaataaggtttcaatatacatctacatactatatatatatttggcaacttgtatttgtgtgtatatatatatatatatgtttatgtatatatgtgattctgataaaatagacattgctattctgttttttatatgtaaaaacaaaacaagaaaaaatagagaattctacatactaaatctctctccttttttaattttaatatttgttatcatttatttattggtgctactgtttatccgtaataattgtggggaaaagatattaacatcacgtctttgtctctagtgcagtttttcgagatattccgtagtacatatttatttttaaacaacgacaaagaaatacagatatatcttaaaaaaaaaaaagcattttgtattaaagaatttaattctgatctcaaaaaaaaaaaaaaaaaa

SEQ ID NO: 27 - DNA, 3608 bp, Homo sapiens; identical to SEQ ID NO: 26

SEQ ID NO: 28 - DNA, 3554 bp, Homo sapiens
tcgcggaggcttggggcagccgggtagctcggaggtcgtggcgctgggggctagcaccagcgctctgtcgggaggcgcagcggttaggtggaccggtcagcggactcaccggccagggcgctcggtgctggaatttgatattcattgatccgggttttatccctcttcttttttcttaaacatttttttttaaaactgtattgtttctcgttttaatttatttttgcttgccattccccacttgaatcgggccgacggcttggggagattgctctacttccccaaatcactgtggattttggaaaccagcagaaagaggaaagaggtagcaagagctccagagagaagtcgaggaagagagagacggggtcagagagagcgcgcgggcgtgcgagcagcgaaagcgacaggggcaaagtgagtgacctgcttttgggggtgaccgccggagcgcggcgtgagccctcccccttgggatcccgcagctgaccagtcgcgctgacggacagacagacagacaccgcccccagccccagctaccacctcctccccggccggcggcggacagtggacgcggcggcgagccgcgggcaggggccggagcccgcgcccggaggcggggtggagggggtcggggctcgcggcgtcgcactgaaacttttcgtccaacttctgggctgttctcgcttcggaggagccgtggtccgcgcgggggaagccgagccgagcggagccgcgagaagtgctagctcgggccgggaggagccgcagccggaggagggggaggaggaagaagagaaggaagaggagagggggccgcagtggcgactcggcgctcggaagccgggctcatggacgggtgaggcggcggtgtgcgcagacagtgctccagccgcgcgcgctccccaggccctggcccgggcctcgggccggggaggaagagtagctcgccgaggcgccgaggagagcgggccgccccacagcccgagccggagagggagcgcgagccgcgccggccccggtcgggcctccgaaaccatgaactttctgctgtcttgggtgcattggagccttgccttgctgctctacctccaccatgccaagtggtcccaggctgcacccatggcagaaggaggagggcagaatcatcacgaagtggtgaagttcatggatgtctatcagcgcagctactgccatccaatcgagaccctggtggacatcttccaggagtaccctgatgagatcgagtacatcttcaagccatcctgtgtgcccctgatgcgatgcgggggctgctgcaatgacgagggcctggagtgtgtgcccactgaggagtccaacatcaccatgcagattatgcggatcaaacctcaccaaggccagcacataggagagatgagcttcctacagcacaacaaatgtgaatgcagaccaaagaaagatagagcaagacaagaaaatccctgtgggccttgctcagagcggagaaagcatttgtttgtacaagatccgcagacgtgtaaatgttcctgcaaaaacacagactcgcgttgcaaggcgaggcagcttgagttaaacgaacgtacttgcagatgtgacaagccgaggcggtgagccgggcaggaggaaggagcctccctcagggtttcgggaaccagatctctcaccaggaaagactgatacagaacgatcgatacagaaaccacgctgccgccaccacaccatcaccatcgacagaacagtccttaatccagaaacctgaaatgaaggaagaggagactctgcgcagagcactttgggtccggagggcgagactccggcggaagcattcccgggcgggtgacccagcacggtccctcttggaattggattcgccattttatttttcttgctgctaaatcaccgagcccggaagattagagagttttatttctgggattcctgtagacacacccacccacatacatacatttatatatatatatattatatatatataaaaataaatatctctattttatatatataaaatatatatattctttttttaaattaacagtgctaatgttattggtgtcttcactggatgtatttgactgctgtggacttgagttgggaggggaatgttcccactcagatcctgacagggaagaggaggagatgagagactctggcatgatcttttttttgtcccacttggtggggccagggtcctctcccctgcccaggaatgtgcaaggccagggcatgggggcaaatatgacccagttttgggaacaccgacaaacccagccctggcgctgagcctctctaccccaggtcagacggacagaaagacagatcacaggtacagggatgaggacaccggctctgaccaggagtttggggagcttcaggacattgctgtgctttggggattccctccacatgctgcacgcgcatctcgcccccaggggcactgcctggaagattcaggagcctgggcggccttcgcttactctcacctgcttctgagttgcccaggagaccactggcagatgtcccggcgaagagaagagacacattgttggaagaagcagcccatgacagctccccttcctgggactcgccctcatcctcttcctgctccccttcctggggtgcagcctaaaaggacctatgtcctcacaccattgaaaccactagttctgtccccccaggagacctggttgtgtgtgtgtgagtggttgaccttcctccatcccctggtccttcccttcccttcccgaggcacagagagacagggcaggatccacgtgcccattgtggaggcagagaaaagagaaagtgttttatatacggtacttatttaatatccctttttaattagaaattaaaacagttaatttaattaaagagtagggttttttttcagtattcttggttaatatttaatttcaactatttatgagatgtatcttttgctctctcttgctctcttatttgtaccggtttttgtatataaaattcatgtttccaatctctctctccctgatcggtgacagtcactagcttatcttgaacagatatttaattttgctaacactcagctctgccctccccgatcccctggctccccagcacacattcctttgaaataaggtttcaatatacatctacatactatatatatatttggcaacttgtatttgtgtgtatatatatatatatatgtttatgtatatatgtgattctgataaaatagacattgctattctgttttttatatgtaaaaacaaaacaagaaaaaatagagaattctacatactaaatctctctccttttttaattttaatatttgttatcatttatttattggtgctactgtttatccgtaataattgtggggaaaagatattaacatcacgtctttgtctctagtgcagtttttcgagatattccgtagtacatatttatttttaaacaacgacaaagaaatacagatatatcttaaaaaaaaaaaagcattttgtattaaagaatttaattctgatctcaaaaaaaaaaaaaaaaaa

SEQ ID NO: 29 - DNA, 3554 bp, Homo sapiens; identical to SEQ ID NO: 28

SEQ ID NO: 30 - DNA, 3519 bp, Homo sapiens
tcgcggaggcttggggcagccgggtagctcggaggtcgtggcgctgggggctagcaccagcgctctgtcgggaggcgcagcggttaggtggaccggtcagcggactcaccggccagggcgctcggtgctggaatttgatattcattgatccgggttttatccctcttcttttttcttaaacatttttttttaaaactgtattgtttctcgttttaatttatttttgcttgccattccccacttgaatcgggccgacggcttggggagattgctctacttccccaaatcactgtggattttggaaaccagcagaaagaggaaagaggtagcaagagctccagagagaagtcgaggaagagagagacggggtcagagagagcgcgcgggcgtgcgagcagcgaaagcgacaggggcaaagtgagtgacctgcttttgggggtgaccgccggagcgcggcgtgagccctcccccttgggatcccgcagctgaccagtcgcgctgacggacagacagacagacaccgcccccagccccagctaccacctcctccccggccggcggcggacagtggacgcggcggcgagccgcgggcaggggccggagcccgcgcccggaggcggggtggagggggtcggggctcgcggcgtcgcactgaaacttttcgtccaacttctgggctgttctcgcttcggaggagccgtggtccgcgcgggggaagccgagccgagcggagccgcgagaagtgctagctcgggccgggaggagccgcagccggaggagggggaggaggaagaagagaaggaagaggagagggggccgcagtggcgactcggcgctcggaagccgggctcatggacgggtgaggcggcggtgtgcgcagacagtgctccagccgcgcgcgctccccaggccctggcccgggcctcgggccggggaggaagagtagctcgccgaggcgccgaggagagcgggccgccccacagcccgagccggagagggagcgcgagccgcgccggccccggtcgggcctccgaaaccatgaactttctgctgtcttgggtgcattggagccttgccttgctgctctacctccaccatgccaagtggtcccaggctgcacccatggcagaaggaggagggcagaatcatcacgaagtggtgaagttcatggatgtctatcagcgcagctactgccatccaatcgagaccctggtggacatcttccaggagtaccctgatgagatcgagtacatcttcaagccatcctgtgtgcccctgatgcgatgcgggggctgctgcaatgacgagggcctggagtgtgtgcccactgaggagtccaacatcaccatgcagattatgcggatcaaacctcaccaaggccagcacataggagagatgagcttcctacagcacaacaaatgtgaatgcagaccaaagaaagatagagcaagacaagaaaatccctgtgggccttgctcagagcggagaaagcatttgtttgtacaagatccgcagacgtgtaaatgttcctgcaaaaacacagactcgcgttgcaagatgtgacaagccgaggcggtgagccgggcaggaggaaggagcctccctcagggtttcgggaaccagatctctcaccaggaaagactgatacagaacgatcgatacagaaaccacgctgccgccaccacaccatcaccatcgacagaacagtccttaatccagaaacctgaaatgaaggaagaggagactctgcgcagagcactttgggtccggagggcgagactccggcggaagcattcccgggcgggtgacccagcacggtccctcttggaattggattcgccattttatttttcttgctgctaaatcaccgagcccggaagattagagagttttatttctgggattcctgtagacacacccacccacatacatacatttatatatatatatattatatatatataaaaataaatatctctattttatatatataaaatatatatattctttttttaaattaacagtgctaatgttattggtgtcttcactggatgtatttgactgctgtggacttgagttgggaggggaatgttcccactcagatcctgacagggaagaggaggagatgagagactctggcatgatcttttttttgtcccacttggtggggccagggtcctctcccctgcccaggaatgtgcaaggccagggcatgggggcaaatatgacccagttttgggaacaccgacaaacccagccctggcgctgagcctctctaccccaggtcagacggacagaaagacagatcacaggtacagggatgaggacaccggctctgaccaggagtttggggagcttcaggacattgctgtgctttggggattccctccacatgctgcacgcgcatctcgcccccaggggcactgcctggaagattcaggagcctgggcggccttcgcttactctcacctgcttctgagttgcccaggagaccactggcagatgtcccggcgaagagaagagacacattgttggaagaagcagcccatgacagctccccttcctgggactcgccctcatcctcttcctgctccccttcctggggtgcagcctaaaaggacctatgtcctcacaccattgaaaccactagttctgtccccccaggagacctggttgtgtgtgtgtgagtggttgaccttcctccatcccctggtccttcccttcccttcccgaggcacagagagacagggcaggatccacgtgcccattgtggaggcagagaaaagagaaagtgttttatatacggtacttatttaatatccctttttaattagaaattaaaacagttaatttaattaaagagtagggttttttttcagtattcttggttaatatttaatttcaactatttatgagatgtatcttttgctctctcttgctctcttatttgtaccggtttttgtatataaaattcatgtttccaatctctctctccctgatcggtgacagtcactagcttatcttgaacagatatttaattttgctaacactcagctctgccctccccgatcccctggctccccagcacacattcctttgaaataaggtttcaatatacatctacatactatatatatatttggcaacttgtatttgtgtgtatatatatatatatatgtttatgtatatatgtgattctgataaaatagacattgctattctgttttttatatgtaaaaacaaaacaagaaaaaatagagaattctacatactaaatctctctccttttttaattttaatatttgttatcatttatttattggtgctactgtttatccgtaataattgtggggaaaagatattaacatcacgtctttgtctctagtgcagtttttcgagatattccgtagtacatatttatttttaaacaacgacaaagaaatacagatatatcttaaaaaaaaaaaagcattttgtattaaagaatttaattctgatctcaaaaaaaaaaaaaaaaaa

SEQ ID NO: 31 - DNA, 3519 bp, Homo sapiens; identical to SEQ ID NO: 30

SEQ ID NO: 32 - DNA, 3422 bp, Homo sapiens
tcgcggaggcttggggcagccgggtagctcggaggtcgtggcgctgggggctagcaccagcgctctgtcgggaggcgcagcggttaggtggaccggtcagcggactcaccggccagggcgctcggtgctggaatttgatattcattgatccgggttttatccctcttcttttttcttaaacatttttttttaaaactgtattgtttctcgttttaatttatttttgcttgccattccccacttgaatcgggccgacggcttggggagattgctctacttccccaaatcactgtggattttggaaaccagcagaaagaggaaagaggtagcaagagctccagagagaagtcgaggaagagagagacggggtcagagagagcgcgcgggcgtgcgagcagcgaaagcgacaggggcaaagtgagtgacctgcttttgggggtgaccgccggagcgcggcgtgagccctcccccttgggatcccgcagctgaccagtcgcgctgacggacagacagacagacaccgcccccagccccagctaccacctcctccccggccggcggcggacagtggacgcggcggcgagccgcgggcaggggccggagcccgcgcccggaggcggggtggagggggtcggggctcgcggcgtcgcactgaaacttttcgtccaacttctgggctgttctcgcttcggaggagccgtggtccgcgcgggggaagccgagccgagcggagccgcgagaagtgctagctcgggccgggaggagccgcagccggaggagggggaggaggaagaagagaaggaagaggagagggggccgcagtggcgactcggcgctcggaagccgggctcatggacgggtgaggcggcggtgtgcgcagacagtgctccagccgcgcgcgctccccaggccctggcccgggcctcgggccggggaggaagagtagctcgccgaggcgccgaggagagcgggccgccccacagcccgagccggagagggagcgcgagccgcgccggccccggtcgggcctccgaaaccatgaactttctgctgtcttgggtgcattggagccttgccttgctgctctacctccaccatgccaagtggtcccaggctgcacccatggcagaaggaggagggcagaatcatcacgaagtggtgaagttcatggatgtctatcagcgcagctactgccatccaatcgagaccctggtggacatcttccaggagtaccctgatgagatcgagtacatcttcaagccatcctgtgtgcccctgatgcgatgcgggggctgctgcaatgacgagggcctggagtgtgtgcccactgaggagtccaacatcaccatgcagattatgcggatcaaacctcaccaaggccagcacataggagagatgagcttcctacagcacaacaaatgtgaatgcagaccaaagaaagatagagcaagacaagaaaaatgtgacaagccgaggcggtgagccgggcaggaggaaggagcctccctcagggtttcgggaaccagatctctcaccaggaaagactgatacagaacgatcgatacagaaaccacgctgccgccaccacaccatcaccatcgacagaacagtccttaatccagaaacctgaaatgaaggaagaggagactctgcgcagagcactttgggtccggagggcgagactccggcggaagcattcccgggcgggtgacccagcacggtccctcttggaattggattcgccattttatttttcttgctgctaaatcaccgagcccggaagattagagagttttatttctgggattcctgtagacacacccacccacatacatacatttatatatatatatattatatatatataaaaataaatatctctattttatatatataaaatatatatattctttttttaaattaacagtgctaatgttattggtgtcttcactggatgtatttgactgctgtggacttgagttgggaggggaatgttcccactcagatcctgacagggaagaggaggagatgagagactctggcatgatcttttttttgtcccacttggtggggccagggtcctctcccctgcccaggaatgtgcaaggccagggcatgggggcaaatatgacccagttttgggaacaccgacaaacccagccctggcgctgagcctctctaccccaggtcagacggacagaaagacagatcacaggtacagggatgaggacaccggctctgaccaggagtttggggagcttcaggacattgctgtgctttggggattccctccacatgctgcacgcgcatctcgcccccaggggcactgcctggaagattcaggagcctgggcggccttcgcttactctcacctgcttctgagttgcccaggagaccactggcagatgtcccggcgaagagaagagacacattgttggaagaagcagcccatgacagctccccttcctgggactcgccctcatcctcttcctgctccccttcctggggtgcagcctaaaaggacctatgtcctcacaccattgaaaccactagttctgtccccccaggagacctggttgtgtgtgtgtgagtggttgaccttcctccatcccctggtccttcccttcccttcccgaggcacagagagacagggcaggatccacgtgcccattgtggaggcagagaaaagagaaagtgttttatatacggtacttatttaatatccctttttaattagaaattaaaacagttaatttaattaaagagtagggttttttttcagtattcttggttaatatttaatttcaactatttatgagatgtatcttttgctctctcttgctctcttatttgtaccggtttttgtatataaaattcatgtttccaatctctctctccctgatcggtgacagtcactagcttatcttgaacagatatttaattttgctaacactcagctctgccctccccgatcccctggctccccagcacacattcctttgaaataaggtttcaatatacatctacatactatatatatatttggcaacttgtatttgtgtgtatatatatatatatatgtttatgtatatatgtgattctgataaaatagacattgctattctgttttttatatgtaaaaacaaaacaagaaaaaatagagaattctacatactaaatctctctccttttttaattttaatatttgttatcatttatttattggtgctactgtttatccgtaataattgtggggaaaagatattaacatcacgtctttgtctctagtgcagtttttcgagatattccgtagtacatatttatttttaaacaacgacaaagaaatacagatatatcttaaaaaaaaaaaagcattttgtattaaagaatttaattctgatctcaaaaaaaaaaaaaaaaaa

SEQ ID NO: 33 - DNA, 3422 bp, Homo sapiens; identical to SEQ ID NO: 32

SEQ ID NO: 34 - DNA, 3488 bp, Homo sapiens
tcgcggaggcttggggcagccgggtagctcggaggtcgtggcgctgggggctagcaccagcgctctgtcgggaggcgcagcggttaggtggaccggtcagcggactcaccggccagggcgctcggtgctggaatttgatattcattgatccgggttttatccctcttcttttttcttaaacatttttttttaaaactgtattgtttctcgttttaatttatttttgcttgccattccccacttgaatcgggccgacggcttggggagattgctctacttccccaaatcactgtggattttggaaaccagcagaaagaggaaagaggtagcaagagctccagagagaagtcgaggaagagagagacggggtcagagagagcgcgcgggcgtgcgagcagcgaaagcgacaggggcaaagtgagtgacctgcttttgggggtgaccgccggagcgcggcgtgagccctcccccttgggatcccgcagctgaccagtcgcgctgacggacagacagacagacaccgcccccagccccagctaccacctcctccccggccggcggcggacagtggacgcggcggcgagccgcgggcaggggccggagcccgcgcccggaggcggggtggagggggtcggggctcgcggcgtcgcactgaaacttttcgtccaacttctgggctgttctcgcttcggaggagccgtggtccgcgcgggggaagccgagccgagcggagccgcgagaagtgctagctcgggccgggaggagccgcagccggaggagggggaggaggaagaagagaaggaagaggagagggggccgcagtggcgactcggcgctcggaagccgggctcatggacgggtgaggcggcggtgtgcgcagacagtgctccagccgcgcgcgctccccaggccctggcccgggcctcgggccggggaggaagagtagctcgccgaggcgccgaggagagcgggccgccccacagcccgagccggagagggagcgcgagccgcgccggccccggtcgggcctccgaaaccatgaactttctgctgtcttgggtgcattggagccttgccttgctgctctacctccaccatgccaagtggtcccaggctgcacccatggcagaaggaggagggcagaatcatcacgaagtggtgaagttcatggatgtctatcagcgcagctactgccatccaatcgagaccctggtggacatcttccaggagtaccctgatgagatcgagtacatcttcaagccatcctgtgtgcccctgatgcgatgcgggggctgctgcaatgacgagggcctggagtgtgtgcccactgaggagtccaacatcaccatgcagattatgcggatcaaacctcaccaaggccagcacataggagagatgagcttcctacagcacaacaaatgtgaatgcagaccaaagaaagatagagcaagacaagaaaatccctgtgggccttgctcagagcggagaaagcatttgtttgtacaagatccgcagacgtgtaaatgttcctgcaaaaacacagactcgcgttgcaaggcgaggcagcttgagttaaacgaacgtacttgcagatctctcaccaggaaagactgatacagaacgatcgatacagaaaccacgctgccgccaccacaccatcaccatcgacagaacagtccttaatccagaaacctgaaatgaaggaagaggagactctgcgcagagcactttgggtccggagggcgagactccggcggaagcattcccgggcgggtgacccagcacggtccctcttggaattggattcgccattttatttttcttgctgctaaatcaccgagcccggaagattagagagttttatttctgggattcctgtagacacacccacccacatacatacatttatatatatatatattatatatatataaaaataaatatctctattttatatatataaaatatatatattctttttttaaattaacagtgctaatgttattggtgtcttcactggatgtatttgactgctgtggacttgagttgggaggggaatgttcccactcagatcctgacagggaagaggaggagatgagagactctggcatgatcttttttttgtcccacttggtggggccagggtcctctcccctgcccaggaatgtgcaaggccagggcatgggggcaaatatgacccagttttgggaacaccgacaaacccagccctggcgctgagcctctctaccccaggtcagacggacagaaagacagatcacaggtacagggatgaggacaccggctctgaccaggagtttggggagcttcaggacattgctgtgctttggggattccctccacatgctgcacgcgcatctcgcccccaggggcactgcctggaagattcaggagcctgggcggccttcgcttactctcacctgcttctgagttgcccaggagaccactggcagatgtcccggcgaagagaagagacacattgttggaagaagcagcccatgacagctccccttcctgggactcgccctcatcctcttcctgctccccttcctggggtgcagcctaaaaggacctatgtcctcacaccattgaaaccactagttctgtccccccaggagacctggttgtgtgtgtgtgagtggttgaccttcctccatcccctggtccttcccttcccttcccgaggcacagagagacagggcaggatccacgtgcccattgtggaggcagagaaaagagaaagtgttttatatacggtacttatttaatatccctttttaattagaaattaaaacagttaatttaattaaagagtagggttttttttcagtattcttggttaatatttaatttcaactatttatgagatgtatcttttgctctctcttgctctcttatttgtaccggtttttgtatataaaattcatgtttccaatctctctctccctgatcggtgacagtcactagcttatcttgaacagatatttaattttgctaacactcagctctgccctccccgatcccctggctccccagcacacattcctttgaaataaggtttcaatatacatctacatactatatatatatttggcaacttgtatttgtgtgtatatatatatatatatgtttatgtatatatgtgattctgataaaatagacattgctattctgttttttatatgtaaaaacaaaacaagaaaaaatagagaattctacatactaaatctctctccttttttaattttaatatttgttatcatttatttattggtgctactgtttatccgtaataattgtggggaaaagatattaacatcacgtctttgtctctagtgcagtttttcgagatattccgtagtacatatttatttttaaacaacgacaaagaaatacagatatatcttaaaaaaaaaaaagcattttgtattaaagaatttaattctgatctcaaaaaaaaaaaaaaaaaa

SEQ ID NO: 35 - DNA, 3488 bp, Homo sapiens; identical to SEQ ID NO: 34

SEQ ID NO: 36 - DNA, 3392 bp, Homo sapiens
tcgcggaggcttggggcagccgggtagctcggaggtcgtggcgctgggggctagcaccagcgctctgtcgggaggcgcagcggttaggtggaccggtcagcggactcaccggccagggcgctcggtgctggaatttgatattcattgatccgggttttatccctcttcttttttcttaaacatttttttttaaaactgtattgtttctcgttttaatttatttttgcttgccattccccacttgaatcgggccgacggcttggggagattgctctacttccccaaatcactgtggattttggaaaccagcagaaagaggaaagaggtagcaagagctccagagagaagtcgaggaagagagagacggggtcagagagagcgcgcgggcgtgcgagcagcgaaagcgacaggggcaaagtgagtgacctgcttttgggggtgaccgccggagcgcggcgtgagccctcccccttgggatcccgcagctgaccagtcgcgctgacggacagacagacagacaccgcccccagccccagctaccacctcctccccggccggcggcggacagtggacgcggcggcgagccgcgggcaggggccggagcccgcgcccggaggcggggtggagggggtcggggctcgcggcgtcgcactgaaacttttcgtccaacttctgggctgttctcgcttcggaggagccgtggtccgcgcgggggaagccgagccgagcggagccgcgagaagtgctagctcgggccgggaggagccgcagccggaggagggggaggaggaagaagagaaggaagaggagagggggccgcagtggcgactcggcgctcggaagccgggctcatggacgggtgaggcggcggtgtgcgcagacagtgctccagccgcgcgcgctccccaggccctggcccgggcctcgggccggggaggaagagtagctcgccgaggcgccgaggagagcgggccgccccacagcccgagccggagagggagcgcgagccgcgccggccccggtcgggcctccgaaaccatgaactttctgctgtcttgggtgcattggagccttgccttgctgctctacctccaccatgccaagtggtcccaggctgcacccatggcagaaggaggagggcagaatcatcacgaagtggtgaagttcatggatgtctatcagcgcagctactgccatccaatcgagaccctggtggacatcttccaggagtaccctgatgagatcgagtacatcttcaagccatcctgtgtgcccctgatgcgatgcgggggctgctgcaatgacgagggcctggagtgtgtgcccactgaggagtccaacatcaccatgcagattatgcggatcaaacctcaccaaggccagcacataggagagatgagcttcctacagcacaacaaatgtgaatgcagatgtgacaagccgaggcggtgagccgggcaggaggaaggagcctccctcagggtttcgggaaccagatctctcaccaggaaagactgatacagaacgatcgatacagaaaccacgctgccgccaccacaccatcaccatcgacagaacagtccttaatccagaaacctgaaatgaaggaagaggagactctgcgcagagcactttgggtccggagggcgagactccggcggaagcattcccgggcgggtgacccagcacggtccctcttggaattggattcgccattttatttttcttgctgctaaatcaccgagcccggaagattagagagttttatttctgggattcctgtagacacacccacccacatacatacatttatatatatatatattatatatatataaaaataaatatctctattttatatatataaaatatatatattctttttttaaattaacagtgctaatgttattggtgtcttcactggatgtatttgactgctgtggacttgagttgggaggggaatgttcccactcagatcctgacagggaagaggaggagatgagagactctggcatgatcttttttttgtcccacttggtggggccagggtcctctcccctgcccaggaatgtgcaaggccagggcatgggggcaaatatgacccagttttgggaacaccgacaaacccagccctggcgctgagcctctctaccccaggtcagacggacagaaagacagatcacaggtacagggatgaggacaccggctctgaccaggagtttggggagcttcaggacattgctgtgctttggggattccctccacatgctgcacgcgcatctcgcccccaggggcactgcctggaagattcaggagcctgggcggccttcgcttactctcacctgcttctgagttgcccaggagaccactggcagatgtcccggcgaagagaagagacacattgttggaagaagcagcccatgacagctccccttcctgggactcgccctcatcctcttcctgctccccttcctggggtgcagcctaaaaggacctatgtcctcacaccattgaaaccactagttctgtccccccaggagacctggttgtgtgtgtgtgagtggttgaccttcctccatcccctggtccttcccttcccttcccgaggcacagagagacagggcaggatccacgtgcccattgtggaggcagagaaaagagaaagtgttttatatacggtacttatttaatatccctttttaattagaaattaaaacagttaatttaattaaagagtagggttttttttcagtattcttggttaatatttaatttcaactatttatgagatgtatcttttgctctctcttgctctcttatttgtaccggtttttgtatataaaattcatgtttccaatctctctctccctgatcggtgacagtcactagcttatcttgaacagatatttaattttgctaacactcagctctgccctccccgatcccctggctccccagcacacattcctttgaaataaggtttcaatatacatctacatactatatatatatttggcaacttgtatttgtgtgtatatatatatatatatgtttatgtatatatgtgattctgataaaatagacattgctattctgttttttatatgtaaaaacaaaacaagaaaaaatagagaattctacatactaaatctctctccttttttaattttaatatttgttatcatttatttattggtgctactgtttatccgtaataattgtggggaaaagatattaacatcacgtctttgtctctagtgcagtttttcgagatattccgtagtacatatttatttttaaacaacgacaaagaaatacagatatatcttaaaaaaaaaaaagcattttgtattaaagaatttaattctgatctcaaaaaaaaaaaaaaaaaa

SEQ ID NO: 37 - DNA, 3392 bp, Homo sapiens; identical to SEQ ID NO: 36

SEQ ID NO: 38 - DNA, 3494 bp, Homo sapiens
tcgcggaggcttggggcagccgggtagctcggaggtcgtggcgctgggggctagcaccagcgctctgtcgggaggcgcagcggttaggtggaccggtcagcggactcaccggccagggcgctcggtgctggaatttgatattcattgatccgggttttatccctcttcttttttcttaaacatttttttttaaaactgtattgtttctcgttttaatttatttttgcttgccattccccacttgaatcgggccgacggcttggggagattgctctacttccccaaatcactgtggattttggaaaccagcagaaagaggaaagaggtagcaagagctccagagagaagtcgaggaagagagagacggggtcagagagagcgcgcgggcgtgcgagcagcgaaagcgacaggggcaaagtgagtgacctgcttttgggggtgaccgccggagcgcggcgtgagccctcccccttgggatcccgcagctgaccagtcgcgctgacggacagacagacagacaccgcccccagccccagctaccacctcctccccggccggcggcggacagtggacgcggcggcgagccgcgggcaggggccggagcccgcgcccggaggcggggtggagggggtcggggctcgcggcgtcgcactgaaacttttcgtccaacttctgggctgttctcgcttcggaggagccgtggtccgcgcgggggaagccgagccgagcggagccgcgagaagtgctagctcgggccgggaggagccgcagccggaggagggggaggaggaagaagagaaggaagaggagagggggccgcagtggcgactcggcgctcggaagccgggctcatggacgggtgaggcggcggtgtgcgcagacagtgctccagccgcgcgcgctccccaggccctggcccgggcctcgggccggggaggaagagtagctcgccgaggcgccgaggagagcgggccgccccacagcccgagccggagagggagcgcgagccgcgccggccccggtcgggcctccgaaaccatgaactttctgctgtcttgggtgcattggagccttgccttgctgctctacctccaccatgccaagtggtcccaggctgcacccatggcagaaggaggagggcagaatcatcacgaagtggtgaagttcatggatgtctatcagcgcagctactgccatccaatcgagaccctggtggacatcttccaggagtaccctgatgagatcgagtacatcttcaagccatcctgtgtgcccctgatgcgatgcgggggctgctgcaatgacgagggcctggagtgtgtgcccactgaggagtccaacatcaccatgcagattatgcggatcaaacctcaccaaggccagcacataggagagatgagcttcctacagcacaacaaatgtgaatgcagaccaaagaaagatagagcaagacaagaaaaaaaatcagttcgaggaaagggaaaggggcaaaaacgaaagcgcaagaaatcccggtataagtcctggagcgtatgtgacaagccgaggcggtgagccgggcaggaggaaggagcctccctcagggtttcgggaaccagatctctcaccaggaaagactgatacagaacgatcgatacagaaaccacgctgccgccaccacaccatcaccatcgacagaacagtccttaatccagaaacctgaaatgaaggaagaggagactctgcgcagagcactttgggtccggagggcgagactccggcggaagcattcccgggcgggtgacccagcacggtccctcttggaattggattcgccattttatttttcttgctgctaaatcaccgagcccggaagattagagagttttatttctgggattcctgtagacacacccacccacatacatacatttatatatatatatattatatatatataaaaataaatatctctattttatatatataaaatatatatattctttttttaaattaacagtgctaatgttattggtgtcttcactggatgtatttgactgctgtggacttgagttgggaggggaatgttcccactcagatcctgacagggaagaggaggagatgagagactctggcatgatcttttttttgtcccacttggtggggccagggtcctctcccctgcccaggaatgtgcaaggccagggcatgggggcaaatatgacccagttttgggaacaccgacaaacccagccctggcgctgagcctctctaccccaggtcagacggacagaaagacagatcacaggtacagggatgaggacaccggctctgaccaggagtttggggagcttcaggacattgctgtgctttggggattccctccacatgctgcacgcgcatctcgcccccaggggcactgcctggaagattcaggagcctgggcggccttcgcttactctcacctgcttctgagttgcccaggagaccactggcagatgtcccggcgaagagaagagacacattgttggaagaagcagcccatgacagctccccttcctgggactcgccctcatcctcttcctgctccccttcctggggtgcagcctaaaaggacctatgtcctcacaccattgaaaccactagttctgtccccccaggagacctggttgtgtgtgtgtgagtggttgaccttcctccatcccctggtccttcccttcccttcccgaggcacagagagacagggcaggatccacgtgcccattgtggaggcagagaaaagagaaagtgttttatatacggtacttatttaatatccctttttaattagaaattaaaacagttaatttaattaaagagtagggttttttttcagtattcttggttaatatttaatttcaactatttatgagatgtatcttttgctctctcttgctctcttatttgtaccggtttttgtatataaaattcatgtttccaatctctctctccctgatcggtgacagtcactagcttatcttgaacagatatttaattttgctaacactcagctctgccctccccgatcccctggctccccagcacacattcctttgaaataaggtttcaatatacatctacatactatatatatatttggcaacttgtatttgtgtgtatatatatatatatatgtttatgtatatatgtgattctgataaaatagacattgctattctgttttttatatgtaaaaacaaaacaagaaaaaatagagaattctacatactaaatctctctccttttttaattttaatatttgttatcatttatttattggtgctactgtttatccgtaataattgtggggaaaagatattaacatcacgtctttgtctctagtgcagtttttcgagatattccgtagtacatatttatttttaaacaacgacaaagaaatacagatatatcttaaaaaaaaaaaagcattttgtattaaagaatttaattctgatctcaaaaaaaaaaaaaaaaaa

SEQ ID NO: 39 - DNA, 3494 bp, Homo sapiens; identical to SEQ ID NO: 38

SEQ ID NO: 40 - DNA, 3494 bp, Homo sapiens; identical to SEQ ID NO: 38

SEQ ID NO: 41 - DNA, 1721 bp, Homo sapiens
gccgtccccgccgccgctgcccgccgccaccggccgcccgcccgcccggctcctccggccgcctccgctgcgctgcgctgcgctgcctgcacccagggctcgggagggggccgcggaggagtcgccccccgcgcccggcccccgcccgccgcgcccgggcccgcgccatggggctctggctgtcgccgccccccgcgccgccgggctagggcgatgcgggcgcccccggcgggcggccccggcgggcaccatgagccctctgctccgccgcctgctgctcgccgcactcctgcagctggcccccgcccaggcccctgtctcccagcctgatgcccctggccaccagaggaaagtggtgtcatggatagatgtgtatactcgcgctacctgccagccccgggaggtggtggtgcccttgactgtggagctcatgggcaccgtggccaaacagctggtgcccagctgcgtgactgtgcagcgctgtggtggctgctgccctgacgatggcctggagtgtgtgcccactgggcagcaccaagtccggatgcagatcctcatgatccggtacccgagcagtcagctgggggagatgtccctggaagaacacagccagtgtgaatgcagacctaaaaaaaaggacagtgctgtgaagccagacagccccaggcccctctgcccacgctgcacccagcaccaccagcgccctgacccccggacctgccgctgccgctgccgacgccgcagcttcctccgttgccaagggcggggcttagagctcaacccagacacctgcaggtgccggaagctgcgaaggtgacacatggcttttcagactcagcagggtgacttgcctcagaggctatatcccagtgggggaacaaagaggagcctggtaaaaaacagccaagcccccaagacctcagcccaggcagaagctgctctaggacctgggcctctcagagggctcttctgccatcccttgtctccctgaggccatcatcaaacaggacagagttggaagaggagactgggaggcagcaagaggggtcacataccagctcaggggagaatggagtactgtctcagtttctaaccactctgtgcaagtaagcatcttacaactggctcttcctcccctcactaagaagacccaaacctctgcataatgggatttgggctttggtacaagaactgtgacccccaaccctgataaaagagatggaaggagctgtccctgcctgtgtcactgtttgtcactgtccaggctggctggtttgggcatgaatgtctgcatcactaaatccagagcttgtcttgctccctcattgtgcagatggaggaaatgaggactaaggccccacagcagatcccaggcagggccagaattatgtattcatcactttcaagttattgccacgcatgggagtcagggatagcccagtcaatacagactgcctgccctcctgctcttcaccagggttcttttctagaaggagacagccttctgtggccagagagcttggggtaggacccagatctactgagtgaccttgcttgtcactacccctgcctctctgagcagcagtttccacatgtgcacatagagggaacagaagattgctgtggttggcgtcctcgggccccagagaagtttgagactatctttacgtaatagaaaagaacacttgttcttcctgccaggcaaaaaaaaaaaaaaaaaa

SEQ ID NO: 42 - DNA, 2076 bp, Homo sapiens
cggggaaggggagggaggagggggacgagggctctggcgggtttggaggggctgaacatcgcggggtgttctggtgtcccccgccccgcctctccaaaaagctacaccgacgcggaccgcggcggcgtcctccctcgccctcgcttcacctcgcgggctccgaatgcggggagctcggatgtccggtttcctgtgaggcttttacctgacacccgccgcctttccccggcactggctgggagggcgccctgcaaagttgggaacgcggagccccggacccgctcccgccgcctccggctcgcccagggggggtcgccgggaggagcccgggggagagggaccaggaggggcccgcggcctcgcaggggcgcccgcgcccccacccctgcccccgccagcggaccggtcccccacccccggtccttccaccatgcacttgctgggcttcttctctgtggcgtgttctctgctcgccgctgcgctgctcccgggtcctcgcgaggcgcccgccgccgccgccgccttcgagtccggactcgacctctcggacgcggagcccgacgcgggcgaggccacggcttatgcaagcaaagatctggaggagcagttacggtctgtgtccagtgtagatgaactcatgactgtactctacccagaatattggaaaatgtacaagtgtcagctaaggaaaggaggctggcaacataacagagaacaggccaacctcaactcaaggacagaagagactataaaatttgctgcagcacattataatacagagatcttgaaaagtattgataatgagtggagaaagactcaatgcatgccacgggaggtgtgtatagatgtggggaaggagtttggagtcgcgacaaacaccttctttaaacctccatgtgtgtccgtctacagatgtgggggttgctgcaatagtgaggggctgcagtgcatgaacaccagcacgagctacctcagcaagacgttatttgaaattacagtgcctctctctcaaggccccaaaccagtaacaatcagttttgccaatcacacttcctgccgatgcatgtctaaactggatgtttacagacaagttcattccattattagacgttccctgccagcaacactaccacagtgtcaggcagcgaacaagacctgccccaccaattacatgtggaataatcacatctgcagatgcctggctcaggaagattttatgttttcctcggatgctggagatgactcaacagatggattccatgacatctgtggaccaaacaaggagctggatgaagagacctgtcagtgtgtctgcagagcggggcttcggcctgccagctgtggaccccacaaagaactagacagaaactcatgccagtgtgtctgtaaaaacaaactcttccccagccaatgtggggccaaccgagaatttgatgaaaacacatgccagtgtgtatgtaaaagaacctgccccagaaatcaacccctaaatcctggaaaatgtgcctgtgaatgtacagaaagtccacagaaatgcttgttaaaaggaaagaagttccaccaccaaacatgcagctgttacagacggccatgtacgaaccgccagaaggcttgtgagccaggattttcatatagtgaagaagtgtgtcgttgtgtcccttcatattggaaaagaccacaaatgagctaagattgtactgttttccagttcatcgattttctattatggaaaactgtgttgccacagtagaactgtctgtgaacagagagacccttgtgggtccatgctaacaaagacaaaagtctgtctttcctgaaccatgtggataactttacagaaatggactggagctcatctgcaaaaggcctcttgtaaagactggttttctgccaatgaccaaacagccaagattttcctcttgtgatttctttaaaagaatgactatataatttatttccactaaaaatattgtttctgcattcatttttatagcaacaacaattggtaaaactcactgtgatcaatatttttatatcatgcaaaatatgtttaaaataaaatgaaaattgtattat

SEQ ID NO: 43 - DNA, 1822 bp, Homo sapiens
gccgtccccgccgccgctgcccgccgccaccggccgcccgcccgcccggctcctccggccgcctccgctgcgctgcgctgcgctgcctgcacccagggctcgggagggggccgcggaggagtcgccccccgcgcccggcccccgcccgccgcgcccgggcccgcgccatggggctctggctgtcgccgccccccgcgccgccgggctagggcgatgcgggcgcccccggcgggcggccccggcgggcaccatgagccctctgctccgccgcctgctgctcgccgcactcctgcagctggcccccgcccaggcccctgtctcccagcctgatgcccctggccaccagaggaaagtggtgtcatggatagatgtgtatactcgcgctacctgccagccccgggaggtggtggtgcccttgactgtggagctcatgggcaccgtggccaaacagctggtgcccagctgcgtgactgtgcagcgctgtggtggctgctgccctgacgatggcctggagtgtgtgcccactgggcagcaccaagtccggatgcagatcctcatgatccggtacccgagcagtcagctgggggagatgtccctggaagaacacagccagtgtgaatgcagacctaaaaaaaaggacagtgctgtgaagccagacagggctgccactccccaccaccgtccccagccccgttctgttccgggctgggactctgcccccggagcaccctccccagctgacatcacccatcccactccagccccaggcccctctgcccacgctgcacccagcaccaccagcgccctgacccccggacctgccgctgccgctgccgacgccgcagcttcctccgttgccaagggcggggcttagagctcaacccagacacctgcaggtgccggaagctgcgaaggtgacacatggcttttcagactcagcagggtgacttgcctcagaggctatatcccagtgggggaacaaagaggagcctggtaaaaaacagccaagcccccaagacctcagcccaggcagaagctgctctaggacctgggcctctcagagggctcttctgccatcccttgtctccctgaggccatcatcaaacaggacagagttggaagaggagactgggaggcagcaagaggggtcacataccagctcaggggagaatggagtactgtctcagtttctaaccactctgtgcaagtaagcatcttacaactggctcttcctcccctcactaagaagacccaaacctctgcataatgggatttgggctttggtacaagaactgtgacccccaaccctgataaaagagatggaaggagctgtccctgcctgtgtcactgtttgtcactgtccaggctggctggtttgggcatgaatgtctgcatcactaaatccagagcttgtcttgctccctcattgtgcagatggaggaaatgaggactaaggccccacagcagatcccaggcagggccagaattatgtattcatcactttcaagttattgccacgcatgggagtcagggatagcccagtcaatacagactgcctgccctcctgctcttcaccagggttcttttctagaaggagacagccttctgtggccagagagcttggggtaggacccagatctactgagtgaccttgcttgtcactacccctgcctctctgagcagcagtttccacatgtgcacatagagggaacagaagattgctgtggttggcgtcctcgggccccagagaagtttgagactatctttacgtaatagaaaagaacacttgttcttcctgccaggcaaaaaaaaaaaaaaaaaa

SEQ ID NO: 44 - DNA, 3220 bp, Homo sapiens
aaacttttttccctggctctgccctgggtttccccttgaagggatttccctccgcctctgcaacaagaccctttataaagcacagactttctatttcactccgcggtatctgcatcgggcctcactggcttcaggagctgaataccctcccaggcacacacaggtgggacacaaataagggttttggaaccactattttctcatcacgacagcaacttaaaatgcctgggaagatggtcgtgatccttggagcctcaaatatactttggataatgtttgcagcttctcaagcttttaaaatcgagaccaccccagaatctagatatcttgctcagattggtgactccgtctcattgacttgcagcaccacaggctgtgagtccccatttttctcttggagaacccagatagatagtccactgaatgggaaggtgacgaatgaggggaccacatctacgctgacaatgaatcctgttagttttgggaacgaacactcttacctgtgcacagcaacttgtgaatctaggaaattggaaaaaggaatccaggtggagatctactcttttcctaaggatccagagattcatttgagtggccctctggaggctgggaagccgatcacagtcaagtgttcagttgctgatgtatacccatttgacaggctggagatagacttactgaaaggagatcatctcatgaagagtcaggaatttctggaggatgcagacaggaagtccctggaaaccaagagtttggaagtaacctttactcctgtcattgaggatattggaaaagttcttgtttgccgagctaaattacacattgatgaaatggattctgtgcccacagtaaggcaggctgtaaaagaattgcaagtctacatatcacccaagaatacagttatttctgtgaatccatccacaaagctgcaagaaggtggctctgtgaccatgacctgttccagcgagggtctaccagctccagagattttctggagtaagaaattagataatgggaatctacagcacctttctggaaatgcaactctcaccttaattgctatgaggatggaagattctggaatttatgtgtgtgaaggagttaatttgattgggaaaaacagaaaagaggtggaattaattgttcaagagaaaccatttactgttgagatctcccctggaccccggattgctgctcagattggagactcagtcatgttgacatgtagtgtcatgggctgtgaatccccatctttctcctggagaacccagatagacagccctctgagcgggaaggtgaggagtgaggggaccaattccacgctgaccctgagccctgtgagttttgagaacgaacactcttatctgtgcacagtgacttgtggacataagaaactggaaaagggaatccaggtggagctctactcattccctagagatccagaaatcgagatgagtggtggcctcgtgaatgggagctctgtcactgtaagctgcaaggttcctagcgtgtacccccttgaccggctggagattgaattacttaagggggagactattctggagaatatagagtttttggaggatacggatatgaaatctctagagaacaaaagtttggaaatgaccttcatccctaccattgaagatactggaaaagctcttgtttgtcaggctaagttacatattgatgacatggaattcgaacccaaacaaaggcagagtacgcaaacactttatgtcaatgttgcccccagagatacaaccgtcttggtcagcccttcctccatcctggaggaaggcagttctgtgaatatgacatgcttgagccagggctttcctgctccgaaaatcctgtggagcaggcagctccctaacggggagctacagcctctttctgagaatgcaactctcaccttaatttctacaaaaatggaagattctggggtttatttatgtgaaggaattaaccaggctggaagaagcagaaaggaagtggaattaattatccaagttactccaaaagacataaaacttacagcttttccttctgagagtgtcaaagaaggagacactgtcatcatctcttgtacatgtggaaatgttccagaaacatggataatcctgaagaaaaaagcggagacaggagacacagtactaaaatctatagatggcgcctataccatccgaaaggcccagttgaaggatgcgggagtatatgaatgtgaatctaaaaacaaagttggctcacaattaagaagtttaacacttgatgttcaaggaagagaaaacaacaaagactatttttctcctgagcttctcgtgctctattttgcatcctccttaataatacctgccattggaatgataatttactttgcaagaaaagccaacatgaaggggtcatatagtcttgtagaagcacagaagtcaaaagtgtagctaatgcttgatatgttcaactggagacactatttatctgtgcaaatccttgatactgctcatcattccttgagaaaaacaatgagctgagaggcagacttccctgaatgtattgaacttggaaagaaatgcccatctatgtcccttgctgtgagcaagaagtcaaagtaaaacttgctgcctgaagaacagtaactgccatcaagatgagagaactggaggagttccttgatctgtatatacaataacataatttgtacatatgtaaaataaaattatgccatagcaagattgcttaaaatagcaacactctatatttagattgttaaaataactagtgttgcttggactattataatttaatgcatgttaggaaaatttcacattaatatttgctgacagctgacctttgtcatctttcttctattttattccctttcacaaaattttattcctatatagtttattgacaataatttcaggttttgtaaagatgccgggttttatatttttatagacaaataataagcaaagggagcactgggttgactttcaggtactaaatacctcaacctatggtataatggttgactgggtttctctgtatagtactggcatggtacggagatgtttcacgaagtttgttcatcagactcctgtgcaactttcccaatgtggcctaaaaatgcaacttctttttattttcttttgtaaatgtttaggtttttttgtatagtaaagtgataatttctggaattagaaaaaaaaaaaaaaaaaaa

SEQ ID NO: 45 - DNA, 2944 bp, Homo sapiens
aaacttttttccctggctctgccctgggtttccccttgaagggatttccctccgcctctgcaacaagaccctttataaagcacagactttctatttcactccgcggtatctgcatcgggcctcactggcttcaggagctgaataccctcccaggcacacacaggtgggacacaaataagggttttggaaccactattttctcatcacgacagcaacttaaaatgcctgggaagatggtcgtgatccttggagcctcaaatatactttggataatgtttgcagcttctcaagcttttaaaatcgagaccaccccagaatctagatatcttgctcagattggtgactccgtctcattgacttgcagcaccacaggctgtgagtccccatttttctcttggagaacccagatagatagtccactgaatgggaaggtgacgaatgaggggaccacatctacgctgacaatgaatcctgttagttttgggaacgaacactcttacctgtgcacagcaacttgtgaatctaggaaattggaaaaaggaatccaggtggagatctactcttttcctaaggatccagagattcatttgagtggccctctggaggctgggaagccgatcacagtcaagtgttcagttgctgatgtatacccatttgacaggctggagatagacttactgaaaggagatcatctcatgaagagtcaggaatttctggaggatgcagacaggaagtccctggaaaccaagagtttggaagtaacctttactcctgtcattgaggatattggaaaagttcttgtttgccgagctaaattacacattgatgaaatggattctgtgcccacagtaaggcaggctgtaaaagaattgcaagtctacatatcacccaagaatacagttatttctgtgaatccatccacaaagctgcaagaaggtggctctgtgaccatgacctgttccagcgagggtctaccagctccagagattttctggagtaagaaattagataatgggaatctacagcacctttctggaaatgcaactctcaccttaattgctatgaggatggaagattctggaatttatgtgtgtgaaggagttaatttgattgggaaaaacagaaaagaggtggaattaattgttcaagcattccctagagatccagaaatcgagatgagtggtggcctcgtgaatgggagctctgtcactgtaagctgcaaggttcctagcgtgtacccccttgaccggctggagattgaattacttaagggggagactattctggagaatatagagtttttggaggatacggatatgaaatctctagagaacaaaagtttggaaatgaccttcatccctaccattgaagatactggaaaagctcttgtttgtcaggctaagttacatattgatgacatggaattcgaacccaaacaaaggcagagtacgcaaacactttatgtcaatgttgcccccagagatacaaccgtcttggtcagcccttcctccatcctggaggaaggcagttctgtgaatatgacatgcttgagccagggctttcctgctccgaaaatcctgtggagcaggcagctccctaacggggagctacagcctctttctgagaatgcaactctcaccttaatttctacaaaaatggaagattctggggtttatttatgtgaaggaattaaccaggctggaagaagcagaaaggaagtggaattaattatccaagttactccaaaagacataaaacttacagcttttccttctgagagtgtcaaagaaggagacactgtcatcatctcttgtacatgtggaaatgttccagaaacatggataatcctgaagaaaaaagcggagacaggagacacagtactaaaatctatagatggcgcctataccatccgaaaggcccagttgaaggatgcgggagtatatgaatgtgaatctaaaaacaaagttggctcacaattaagaagtttaacacttgatgttcaaggaagagaaaacaacaaagactatttttctcctgagcttctcgtgctctattttgcatcctccttaataatacctgccattggaatgataatttactttgcaagaaaagccaacatgaaggggtcatatagtcttgtagaagcacagaagtcaaaagtgtagctaatgcttgatatgttcaactggagacactatttatctgtgcaaatccttgatactgctcatcattccttgagaaaaacaatgagctgagaggcagacttccctgaatgtattgaacttggaaagaaatgcccatctatgtcccttgctgtgagcaagaagtcaaagtaaaacttgctgcctgaagaacagtaactgccatcaagatgagagaactggaggagttccttgatctgtatatacaataacataatttgtacatatgtaaaataaaattatgccatagcaagattgcttaaaatagcaacactctatatttagattgttaaaataactagtgttgcttggactattataatttaatgcatgttaggaaaatttcacattaatatttgctgacagctgacctttgtcatctttcttctattttattccctttcacaaaattttattcctatatagtttattgacaataatttcaggttttgtaaagatgccgggttttatatttttatagacaaataataagcaaagggagcactgggttgactttcaggtactaaatacctcaacctatggtataatggttgactgggtttctctgtatagtactggcatggtacggagatgtttcacgaagtttgttcatcagactcctgtgcaactttcccaatgtggcctaaaaatgcaacttctttttattttcttttgtaaatgtttaggtttttttgtatagtaaagtgataatttctggaattagaaaaaaaaaaaaaaaaaaa

SEQ ID NO: 46 - DNA, 3034 bp, Homo sapiens
aaacttttttccctggctctgccctgggtttccccttgaagggatttccctccgcctctgcaacaagaccctttataaagcacagactttctatttcactccgcggtatctgcatcgggcctcactggcttcaggagctgaataccctcccaggcacacacaggtgggacacaaataagggttttggaaccactattttctcatcacgacagcaacttaaaatgcctgggaagatggtcgtgatccttggagcctcaaatatactttggataatgtttgcagcttctcaagcttttaaaatcgagaccaccccagaatctagatatcttgctcagattggtgactccgtctcattgacttgcagcaccacaggctcttttcctaaggatccagagattcatttgagtggccctctggaggctgggaagccgatcacagtcaagtgttcagttgctgatgtatacccatttgacaggctggagatagacttactgaaaggagatcatctcatgaagagtcaggaatttctggaggatgcagacaggaagtccctggaaaccaagagtttggaagtaacctttactcctgtcattgaggatattggaaaagttcttgtttgccgagctaaattacacattgatgaaatggattctgtgcccacagtaaggcaggctgtaaaagaattgcaagtctacatatcacccaagaatacagttatttctgtgaatccatccacaaagctgcaagaaggtggctctgtgaccatgacctgttccagcgagggtctaccagctccagagattttctggagtaagaaattagataatgggaatctacagcacctttctggaaatgcaactctcaccttaattgctatgaggatggaagattctggaatttatgtgtgtgaaggagttaatttgattgggaaaaacagaaaagaggtggaattaattgttcaagagaaaccatttactgttgagatctcccctggaccccggattgctgctcagattggagactcagtcatgttgacatgtagtgtcatgggctgtgaatccccatctttctcctggagaacccagatagacagccctctgagcgggaaggtgaggagtgaggggaccaattccacgctgaccctgagccctgtgagttttgagaacgaacactcttatctgtgcacagtgacttgtggacataagaaactggaaaagggaatccaggtggagctctactcattccctagagatccagaaatcgagatgagtggtggcctcgtgaatgggagctctgtcactgtaagctgcaaggttcctagcgtgtacccccttgaccggctggagattgaattacttaagggggagactattctggagaatatagagtttttggaggatacggatatgaaatctctagagaacaaaagtttggaaatgaccttcatccctaccattgaagatactggaaaagctcttgtttgtcaggctaagttacatattgatgacatggaattcgaacccaaacaaaggcagagtacgcaaacactttatgtcaatgttgcccccagagatacaaccgtcttggtcagcccttcctccatcctggaggaaggcagttctgtgaatatgacatgcttgagccagggctttcctgctccgaaaatcctgtggagcaggcagctccctaacggggagctacagcctctttctgagaatgcaactctcaccttaatttctacaaaaatggaagattctggggtttatttatgtgaaggaattaaccaggctggaagaagcagaaaggaagtggaattaattatccaagttactccaaaagacataaaacttacagcttttccttctgagagtgtcaaagaaggagacactgtcatcatctcttgtacatgtggaaatgttccagaaacatggataatcctgaagaaaaaagcggagacaggagacacagtactaaaatctatagatggcgcctataccatccgaaaggcccagttgaaggatgcgggagtatatgaatgtgaatctaaaaacaaagttggctcacaattaagaagtttaacacttgatgttcaaggaagagaaaacaacaaagactatttttctcctgagcttctcgtgctctattttgcatcctccttaataatacctgccattggaatgataatttactttgcaagaaaagccaacatgaaggggtcatatagtcttgtagaagcacagaagtcaaaagtgtagctaatgcttgatatgttcaactggagacactatttatctgtgcaaatccttgatactgctcatcattccttgagaaaaacaatgagctgagaggcagacttccctgaatgtattgaacttggaaagaaatgcccatctatgtcccttgctgtgagcaagaagtcaaagtaaaacttgctgcctgaagaacagtaactgccatcaagatgagagaactggaggagttccttgatctgtatatacaataacataatttgtacatatgtaaaataaaattatgccatagcaagattgcttaaaatagcaacactctatatttagattgttaaaataactagtgttgcttggactattataatttaatgcatgttaggaaaatttcacattaatatttgctgacagctgacctttgtcatctttcttctattttattccctttcacaaaattttattcctatatagtttattgacaataatttcaggttttgtaaagatgccgggttttatatttttatagacaaataataagcaaagggagcactgggttgactttcaggtactaaatacctcaacctatggtataatggttgactgggtttctctgtatagtactggcatggtacggagatgtttcacgaagtttgttcatcagactcctgtgcaactttcccaatgtggcctaaaaatgcaacttctttttattttcttttgtaaatgtttaggtttttttgtatagtaaagtgataatttctggaattagaaaaaaaaaaaaaaaaaaa

SEQ ID NO: 47 - DNA, 1280 bp, Homo sapiens
cctataacttggaatgtgggtggaggggttcatagttctccctgagtgagacttgcctgcttctctggcccctggtcctgtcctgttctccagcatggtgtgtctgaagctccctggaggctcctgcatgacagcgctgacagtgacactgatggtgctgagctccccactggctttgtctggggacacccgaccacgtttcctgtggcagcctaagagggagtgtcatttcttcaatgggacggagcgggtgcggttcctggacagatacttctataaccaggaggagtccgtgcgcttcgacagcgacgtgggggagttccgggcggtgacggagctggggcggcctgacgctgagtactggaacagccagaaggacatcctggagcaggcgcgggccgcggtggacacctactgcagacacaactacggggttgtggagagcttcacagtgcagcggcgagtccaacctaaggtgactgtatatccttcaaagacccagcccctgcagcaccacaacctcctggtctgctctgtgagtggtttctatccaggcagcattgaagtcaggtggttcctgaacggccaggaagagaaggctgggatggtgtccacaggcctgatccagaatggagactggaccttccagaccctggtgatgctggaaacagttcctcgaagtggagaggtttacacctgccaagtggagcacccaagcgtgacaagccctctcacagtggaatggagagcacggtctgaatctgcacagagcaagatgctgagtggagtcgggggctttgtgctgggcctgctcttccttggggccgggctgttcatctacttcaggaatcagaaaggacactctggacttcagccaacaggattcctgagctgaaatgcagatgaccacattcaaggaagaactttctgccccggctttgcaggatgaaaagctttcctgcttggcagttattcttccacaagagagggctttctcaggacctggttgctactggttcggcaactgcagaaaatgtcctcccttgtggcttcctcagctcctgcccttggcctgaagtcccagcattgatggcagcgcctcatcttcaacttttgtgctcccctttgcctaaaccgtatggcctcccgtgcatctgtattcaccctgtatgacaaacacattacattattaaatgtttctcaaagatggagttaaaaaaaaaaaaaaaaaaaaaaaaaaaaaaaaaaaaaaaaaaaaaaaaaaaaaaaaaaaaaaaaaa

SEQ ID NO: 48 - DNA, 1586 bp, Homo sapiens
tccgcagtcccggttctaaagtccccagtcacccacccggactcacattctccccagaggccgagatgcgggtcatggcgccccgagccctcctcctgctgctctcgggaggcctggccctgaccgagacctgggcctgctcccactccatgaggtatttcgacaccgccgtgtcccggcccggccgcggagagccccgcttcatctcagtgggctacgtggacgacacgcagttcgtgcggttcgacagcgacgccgcgagtccgagaggggagccgcgggcgccgtgggtggagcaggaggggccggagtattgggaccgggagacacagaagtacaagcgccaggcacaggctgaccgagtgagcctgcggaacctgcgcggctactacaaccagagcgaggacgggtctcacaccctccagaggatgtctggctgcgacctggggcccgacgggcgcctcctccgcgggtatgaccagtccgcctacgacggcaaggattacatcgccctgaacgaggacctgcgctcctggaccgccgcggacaccgcggctcagatcacccagcgcaagttggaggcggcccgtgcggcggagcagctgagagcctacctggagggcacgtgcgtggagtggctccgcagatacctggagaacgggaaggagacgctgcagcgcgcagaacccccaaagacacacgtgacccaccaccccctctctgaccatgaggccaccctgaggtgctgggccctgggcttctaccctgcggagatcacactgacctggcagcgggatggggaggaccagacccaggacaccgagcttgtggagaccaggccagcaggagatggaaccttccagaagtgggcagctgtggtggtgccttctggacaagagcagagatacacgtgccatatgcagcacgaggggctgcaagagcccctcaccctgagctgggagccatcttcccagcccaccatccccatcatgggcatcgttgctggcctggctgtcctggttgtcctagctgtccttggagctgtggtcaccgctatgatgtgtaggaggaagagctcaggtggaaaaggagggagctgctctcaggctgcgtgcagcaacagtgcccagggctctgatgagtctctcatcacttgtaaagcctgagacagctgcctgtgtgggactgagatgcaggatttcttcacacctctcctttgtgacttcaagagcctctggcatctctttctgcaaaggcacctgaatgtgtctgcgttcctgttagcataatgtgaggaggtggagagacagcccacccccgtgtccaccgtgacccctgtccccacactgacctgtgttccctccccgatcatctttcctgttccagagaggtggggctggatgtctccatctctgtctcaaattcatggtgcactgagctgcaacttcttacttccctaatgaagttaagaacctgaatataaatttgtgttctcaaatatttgctatgaagcgttgatggattaattaaataagtcaattcctagaagttgagagagcaaataaagacctgagaaccttccagaa

SEQ ID NO: 49 - DNA, 1636 bp, Homo sapiens
gagaagccaatcagtgtcgtcgcggtcgctgttctaaagcccgcacgcacccaccgggactcagattctccccagacgccgaggatggccgtcatggcgccccgaaccctcctcctgctactctcgggggccctggccctgacccagacctgggcgggctcccactccatgaggtatttcttcacatccgtgtcccggcccggccgcggggagccccgcttcatcgccgtgggctacgtggacgacacgcagttcgtgcggttcgacagcgacgccgcgagccagaggatggagccgcgggcgccgtggatagagcaggaggggccggagtattgggaccaggagacacggaatgtgaaggcccagtcacagactgaccgagtggacctggggaccctgcgcggctactacaaccagagcgaggccggttctcacaccatccagataatgtatggctgcgacgtggggtcggacgggcgcttcctccgcgggtaccggcaggacgcctacgacggcaaggattacatcgccctgaacgaggacctgcgctcttggaccgcggcggacatggcggctcagatcaccaagcgcaagtgggaggcggcccatgaggcggagcagttgagagcctacctggatggcacgtgcgtggagtggctccgcagatacctggagaacgggaaggagacgctgcagcgcacggacccccccaagacacatatgacccaccaccccatctctgaccatgaggccaccctgaggtgctgggccctgggcttctaccctgcggagatcacactgacctggcagcgggatggggaggaccagacccaggacacggagctcgtggagaccaggcctgcaggggatggaaccttccagaagtgggcggctgtggtggtgccttctggagaggagcagagatacacctgccatgtgcagcatgagggtctgcccaagcccctcaccctgagatgggagctgtcttcccagcccaccatccccatcgtgggcatcattgctggcctggttctccttggagctgtgatcactggagctgtggtcgctgccgtgatgtggaggaggaagagctcagatagaaaaggagggagttacactcaggctgcaagcagtgacagtgcccagggctctgatgtgtccctcacagcttgtaaagtgtgagacagctgccttgtgtgggactgagaggcaagagttgttcctgcccttccctttgtgacttgaagaaccctgactttgtttctgcaaaggcacctgcatgtgtctgtgttcgtgtaggcataatgtgaggaggtggggagaccaccccacccccatgtccaccatgaccctcttcccacgctgacctgtgctccctccccaatcatctttcctgttccagagaggtggggctgaggtgtctccatctctgtctcaacttcatggtgcactgagctgtaacttcttccttccctattaaaattagaaccttagtataaatttactttctcaaattcttgccatgagaggttgatgagttaattaaaggagaagattcctaaaatttgagagacaaaataaatggaagacatgagaaccttccagagtccaaaaaaaaaaaaaaaaaaaaaaaaaa

SEQ ID NO: 50 - DNA, 1578 bp, Homo sapiens
agttctaaagtccccacgcacccacccggactcagagtctcctcagacgccgagatgctggtcatggcgccccgaaccgtcctcctgctgctctcggcggccctggccctgaccgagacctgggccggctcccactccatgaggtatttctacacctccgtgtcccggcccggccgcggggagccccgcttcatctcagtgggctacgtggacgacacccagttcgtgaggttcgacagcgacgccgcgagtccgagagaggagccgcgggcgccgtggatagagcaggaggggccggagtattgggaccggaacacacagatctacaaggcccaggcacagactgaccgagagagcctgcggaacctgcgcggctactacaaccagagcgaggccgggtctcacaccctccagagcatgtacggctgcgacgtggggccggacgggcgcctcctccgcgggcatgaccagtacgcctacgacggcaaggattacatcgccctgaacgaggacctgcgctcctggaccgccgcggacacggcggctcagatcacccagcgcaagtgggaggcggcccgtgaggcggagcagcggagagcctacctggagggcgagtgcgtggagtggctccgcagatacctggagaacgggaaggacaagctggagcgcgctgaccccccaaagacacacgtgacccaccaccccatctctgaccatgaggccaccctgaggtgctgggccctgggtttctaccctgcggagatcacactgacctggcagcgggatggcgaggaccaaactcaggacactgagcttgtggagaccagaccagcaggagatagaaccttccagaagtgggcagctgtggtggtgccttctggagaagagcagagatacacatgccatgtacagcatgaggggctgccgaagcccctcaccctgagatgggagccgtcttcccagtccaccgtccccatcgtgggcattgttgctggcctggctgtcctagcagttgtggtcatcggagctgtggtcgctgctgtgatgtgtaggaggaagagttcaggtggaaaaggagggagctactctcaggctgcgtgcagcgacagtgcccagggctctgatgtgtctctcacagcttgaaaagcctgagacagctgtcttgtgagggactgagatgcaggatttcttcacgcctcccctttgtgacttcaagagcctctggcatctctttctgcaaaggcacctgaatgtgtctgcgtccctgttagcataatgtgaggaggtggagagacagcccacccttgtgtccactgtgacccctgttcccatgctgacctgtgtttcctccccagtcatctttcttgttccagagaggtggggctggatgtctccatctctgtctcaactttacgtgcactgagctgcaacttcttacttccctactgaaaataagaatctgaatataaatttgttttctcaaatatttgctatgagaggttgatggattaattaaataagtcaattcctggaatttgagagagcaaataaagacctgagaaccttccagaaaaaaaa

SEQ ID NO: 51 - DNA, 1233 bp, Homo sapiens
cctataacttggaatgtgggtggaggggttcatagttctccctgagtgagacttgcctgctgctctggcccctggtcctgtcctgttctccagcatggtgtgtctgaggctccctggaggctcctgcatggcagttctgacagtgacactgatggtgctgagctccccactggctttggctggggacaccagaccacgtttcttggagtactctacgtctgagtgtcatttcttcaatgggacggagcgggtgcggtacctggacagatacttccataaccaggaggagaacgtgcgcttcgacagcgacgtgggggagttccgggcggtgacggagctggggcggcctgatgccgagtactggaacagccagaaggacctcctggagcagaagcggggccgggtggacaactactgcagacacaactacggggttgtggagagcttcacagtgcagcggcgagtccatcctaaggtgactgtgtatccttcaaagacccagcccctgcagcaccataacctcctggtctgttctgtgagtggtttctatccaggcagcattgaagtcaggtggttccggaatggccaggaagagaagactggggtggtgtccacaggcctgatccacaatggagactggaccttccagaccctggtgatgctggaaacagttcctcggagtggagaggtttacacctgccaagtggagcacccaagcgtgacaagccctctcacagtggaatggagagcacggtctgaatctgcacagagcaagatgctgagtggagtcgggggctttgtgctgggcctgctcttccttggggccgggctgttcatctacttcaggaatcagaaaggacactctggacttcagccaagaggattcctgagctgaagtgcagatgacacattcaaagaagaactttctgccccagctttgcaggatgaaaagctttccctcctggctgttattcttccacaagagagggctttctcaggacctggttgctactggttcagcaactgcagaaaatgtcctcccttgtggcttcctcagctcctgttcttggcctgaagccccacagctttgatggcagtgcctcatcttcaacttttgtgctcccctttgcctaaaccctatggcctcctgtgcatctgtactcaccctgtaccacaaacacattacattattaaatgtttctcaaagatggagttaaaaaaaaaaaaaaaaaa

SEQ ID NO: 52 - DNA, 1586 bp, Homo sapiens
tccgcagtcccggttctaaagtccccagtcacccacccggactcacattctccccagaggccgagatgcgggtcatggcgccccgagccctcctcctgctgctctcgggaggcctggccctgaccgagacctgggcctgctcccactccatgaggtatttcgacaccgccgtgtcccggcccggccgcggagagccccgcttcatctcagtgggctacgtggacgacacgcagttcgtgcggttcgacagcgacgccgcgagtccgagaggggagccgcgggcgccgtgggtggagcaggaggggccggagtattgggaccgggagacacagaactacaagcgccaggcacaggctgaccgagtgagcctgcggaacctgcgcggctactacaaccagagcgaggacgggtctcacaccctccagaggatgtatggctgcgacctggggcccgacgggcgcctcctccgcgggtatgaccagtccgcctacgacggcaaggattacatcgccctgaacgaggacctgcgctcctggaccgccgcggacaccgcggctcagatcacccagcgcaagttggaggcggcccgtgcggcggagcagctgagagcctacctggagggcacgtgcgtggagtggctccgcagatacctggagaacgggaaggagacgctgcagcgcgcagaacccccaaagacacacgtgacccaccaccccctctctgaccatgaggccaccctgaggtgctgggccctgggcttctaccctgcggagatcacactgacctggcagcgggatggggaggaccagacccaggacaccgagcttgtggagaccaggccagcaggagatggaaccttccagaagtgggcagctgtggtggtgccttctggacaagagcagagatacacgtgccatatgcagcacgaggggctgcaagagcccctcaccctgagctgggagccatcttcccagcccaccatccccatcatgggcatcgttgctggcctggctgtcctggttgtcctagctgtccttggagctgtggtcaccgctatgatgtgtaggaggaagagctcaggtggaaaaggagggagctgctctcaggctgcgtgcagcaacagtgcccagggctctgatgagtctctcatcacttgtaaagcctgagacagctgcctgtgtgggactgagatgcaggatttcttcacacctctcctttgtgacttcaagagcctctggcatctctttctgcaaaggcgtctgaatgtgtctgcgttcctgttagcataatgtgaggaggtggagagacagcccacccccgtgtccaccgtgacccctgtccccacactgacctgtgttccctccccgatcatctttcctgttccagagaggtggggctggatgtctccatctctgtctcaaattcatggtgcactgagctgcaacttcttacttccctaatgaagttaagaacctgaatataaatttgtgttctcaaatatttgctatgaagcgttgatggattaattaaataagtcaattcctagaagttgagagagcaaataaagacctgagaaccttccagaa

SEQ ID NO: 53 - DNA, 1611 bp, Homo sapiens
gagaagccaatcagtgtcgtcgcggtcgctgttctaaagtccgcacgcacccaccgggactcagattctccccagacgccgaggatggccgtcatggcgccccgaaccctcctcctgctactctcgggggccctggccctgacccagacctgggcgggctcccactccatgaggtatttcttcacatccgtgtcccggcccggccgcggggagccccgcttcatcgccgtgggctacgtggacgacacgcagttcgtgcggttcgacagcgacgccgcgagccagaagatggagccgcgggcgccgtggatagagcaggaggggccggagtattgggaccaggagacacggaatatgaaggcccactcacagactgaccgagcgaacctggggaccctgcgcggctactacaaccagagcgaggacggttctcacaccatccagataatgtatggctgcgacgtggggccggacgggcgcttcctccgcgggtaccggcaggacgcctacgacggcaaggattacatcgccctgaacgaggacctgcgctcttggaccgcggcggacatggcagctcagatcaccaagcgcaagtgggaggcggtccatgcggcggagcagcggagagtctacctggagggccggtgcgtggacgggctccgcagatacctggagaacgggaaggagacgctgcagcgcacggacccccccaagacacatatgacccaccaccccatctctgaccatgaggccaccctgaggtgctgggccctgggcttctaccctgcggagatcacactgacctggcagcgggatggggaggaccagacccaggacacggagctcgtggagaccaggcctgcaggggatggaaccttccagaagtgggcggctgtggtggtgccttctggagaggagcagagatacacctgccatgtgcagcatgagggtctgcccaagcccctcaccctgagatgggagctgtcttcccagcccaccatccccatcgtgggcatcattgctggcctggttctccttggagctgtgatcactggagctgtggtcgctgccgtgatgtggaggaggaagagctcagatagaaaaggagggagttacactcaggctgcaagcagtgacagtgcccagggctctgatgtgtctctcacagcttgtaaagtgtgagacagctgccttgtgtgggactgagaggcaagagttgttcctgcccttccctttgtgacttgaagaaccctgactttgtttctgcaaaggcacctgcatgtgtctgtgttcgtgtaggcataatgtgaggaggtggggagagcaccccacccccatgtccaccatgaccctcttcccacgctgacctgtgctccctctccaatcatctttcctgttccagagaggtggggctgaggtgtctccatctctgtctcaacttcatggtgcactgagctgtaacttcttccttccctattaaaattagaacctgagtataaatttactttctcaaattcttgccatgagaggttgatgagttaattaaaggagaagattcctaaaatttgagagacaaaattaatggaacgcatgagaaccttccagagtcca

SEQ ID NO: 54 - DNA, 2679 bp, Homo sapiens
gcagactcagttctcattcccaatgggtgtcgggtttctagagaagccaatcagcgtcgccacgactcccgactataaagtccccatccggactcaagaagttctcaggactcagaggctgggatcatggtagatggaaccctccttttactcctctcggaggccctggcccttacccagacctgggcgggctcccactccttgaagtatttccacacttccgtgtcccggcccggccgcggggagccccgcttcatctctgtgggctacgtggacgacacccagttcgtgcgcttcgacaacgacgccgcgagtccgaggatggtgccgcgggcgccgtggatggagcaggaggggtcagagtattgggaccgggagacacggagcgccagggacaccgcacagattttccgagtgaatctgcggacgctgcgcggctactacaatcagagcgaggccgggtctcacaccctgcagtggatgcatggctgcgagctggggcccgacgggcgcttcctccgcgggtatgaacagttcgcctacgacggcaaggattatctcaccctgaatgaggacctgcgctcctggaccgcggtggacacggcggctcagatctccgagcaaaagtcaaatgatgcctctgaggcggagcaccagagagcctacctggaagacacatgcgtggagtggctccacaaatacctggagaaggggaaggagacgctgcttcacctggagcccccaaagacacacgtgactcaccaccccatctctgaccatgaggccaccctgaggtgctgggccctgggcttctaccctgcggagatcacactgacctggcagcaggatggggagggccatacccaggacacggagctcgtggagaccaggcctgcaggggatggaaccttccagaagtgggcagctgtggtggtgccttctggagaggagcagagatacacgtgccatgtgcagcatgaggggctacccgagcccgtcaccctgagatggaagccggcttcccagcccaccatccccatcgtgggcatcattgctggcctggttctccttggatctgtggtctctggagctgtggttgctgctgtgatatggaggaagaagagctcaggtggaaaaggagggagctactctaaggctgagtggagcgacagtgcccaggggtctgagtctcacagcttgtaaagcctgagacagctgccttgtgtgcgactgagatgcacagctgccttgtgtgcgactgagatgcaggatttcctcacgcctcccctatgtgtcttaggggactctggcttctctttttgcaagggcctctgaatctgtctgtgtccctgttagcacaatgtgaggaggtagagaaacagtccacctctgtgtctaccatgacccccttcctcacactgacctgtgttccttccctgttctcttttctattaaaaataagaacctgggcagagtgcggcagctcatgcctgtaatcccagcacttagggaggccgaggagggcagatcacgaggtcaggagatcgaaaccatcctggctaacacggtgaaaccccgtctctactaaaaaatacaaaaaattagctgggcgcagaggcacgggcctgtagtcccagctactcaggaggcggaggcaggagaatggcgtcaacccgggaggcggaggttgcagtgagccaggattgtgcgactgcactccagcctgggtgacagggtgaaacgccatctcaaaaaataaaaattgaaaaataaaaaaagaacctggatctcaatttaatttttcatattcttgcaatgaaatggacttgaggaagctaagatcatagctagaaatacagataattccacagcacatctctagcaaatttagcctattcctattctctagcctattccttaccacctgtaatcttgaccatataccttggagttgaatattgttttcatactgctgtggtttgaatgttccctccaacactcatgttgagacttaatccctaatgtggcaatactgaaaggtggggcctttgagatgtgattggatcgtaaggctgtgccttcattcatgggttaatggattaatgggttatcacaggaatgggactggtggctttataagaagaggaaaagagaactgagctagcatgcccagcccacagagagcctccactagagtgatgctaagtggaaatgtgaggtgcagctgccacagagggcccccaccagggaaatgtctagtgtctagtggatccaggccacaggagagagtgccttgtggagcgctgggagcaggacctgaccaccaccaggaccccagaactgtggagtcagtggcagcatgcagcgcccccttgggaaagctttaggcaccagcctgcaacccattcgagcagccacgtaggctgcacccagcaaagccacaggcacggggctacctgaggccttgggggcccaatccctgctccagtgtgtccgtgaggcagcacacgaagtcaaaagagattattctcttcccacagataccttttctctcccatgaccctttaacagcatctgcttcattcccctcaccttcccaggctgatctgaggtaaactttgaagtaaaataaaagctgtgtttgagcatcatttgtatttcaaaaaaaaaaaaaaaaaa

SEQ ID NO: 55 - DNA, 1171 bp, Homo sapiens
ccagcatggtgtgtctgaagctccctggaggttcctacatggcaaagctgacagtgacactgatggtgctgagctccccactggctttggctggggacacccgaccacgtttcttgcagcaggataagtatgagtgtcatttcttcaacgggacggagcgggtgcggttcctgcacagagacatctataaccaagaggaggacttgcgcttcgacagcgacgtgggggagtaccgggcggtgacggagctggggcggcctgacgctgagtactggaacagccagaaggacttcctggaagacaggcgcgccgcggtggacacctactgcagacacaactacggggttggtgagagcttcacagtgcagcggcgagttgagcctaaggtgactgtgtatcctgcaaggacccagaccctgcagcaccacaacctcctggtctgctctgtgaatggtttctatccaggcagcattgaagtcaggtggttccggaacagccaggaagagaaggctggggtggtgtccacaggcctgattcagaatggagactggaccttccagaccctggtgatgctggaaacagttcctcgaagtggagaggtttacacctgccaagtggagcacccaagcgtgacgagccctctcacagtggaatggagagcacagtctgaatctgcacagagcaagatgctgagtggagtcgggggctttgtgctgggcctgctcttccttggggccgggctattcatctacttcaagaatcagaaagggcactctggacttcacccaacaggactcgtgagctgaagtgcagatgaccacattcaagggggaaccttctgccccagctttgcatgatgaaaagctttcctgcttggctcttattcttccacaagagaggactttctcaggccctggttgctaccggttcagcaactctgcagaaaatgtccatccttgtggcttcctcagctcctgcccttggcctgaagtcccagcattgatggcagtgcctcatcttcaactttagtgctcccctttacctaaccctacggcctcccatgcatctgtactccccctgtgtgccacaaatgcactacgttattaaatttttctgaagcccagagttaaaaatcatctgtccacctggctccaaagacaaaaaataaaaa

SEQ ID NO: 56 - DNA, 1152 bp, Homo sapiens
tcctcacaattgctctacagctcagagcagcaactgctgaggctgccttgggaagaagatgatcctaaacaaagctctgctgctgggggccctcgccctgactgccgtgatgagcccctgtggaggtgaagacattgtggctgaccatgttgcctcctatggtgtgaacttctaccagtctcacggtccctctggccagtacacccatgaatttgatggagacgaggagttctatgtggacctggagacgaaagagactgtctggcagttgcctatgtttagcaaatttataagttttgacccgcagagtgcactgagaaatatggctgtgggaaaacacaccttggaattcatgatgagacagtccaactctaccgctgccaccaatgaggttcctgaggtcacagtgttttccaagtttcctgtgacgctgggtcagcccaacaccctcatctgtcttgtggacaacatctttcctcctgtggtcaacatcacctggctgagcaatgggcactcagtcacagaaggtgtttctgagaccagcttcctctccaagagtgatcattccttcttcaagatcagttacctcaccttcctcccttctgctgatgagatttatgactgcaaggtggagcactggggcctggacgagcctcttctgaaacactgggagcctgagattccagcccctatgtcagagctcacagagactttggtctgcgccctggggttgtctgtgggcctcatgggcattgtggtgggcactgtcttcatcatccaaggcctgcgttcagttggtgcttccagacaccaagggctcttatgaatcccatcctgaaaaggaaggtgcatcaccatctacaggagaagaagaatggacttgctaaatgacctagcactattctctggcctgatttatcatatcccttttctcctccaaatgtttcttctctcacctcttctctgggacttaaggtgctatattccctcagagctcacaaatgcctttcaattctttccctgacctcctttcctgaatttttttattttctcaaatgttacctactaagggatgcctgggtaagccactcagctacctaattcctcaatgacctttatctaaaatctccatggaagcaataaattcccttt

SEQ ID NO: 57 - DNA, 1158 bp, Homo sapiens
gcctgctgctctggcccctggtcctgtcctcttctccagcatggtgtgtctgaagctccctggaggctccagcttggcagcgttgacagtgacactgatggtgctgagctcccgactggctttcgctggggacacccgaccacgtttcttggagctgcgtaagtctgagtgtcatttcttcaatgggacggagcgggtgcggtacctggacagatacttccataaccaggaggagttcctgcgcttcgacagcgacgtgggggagtaccgggcggtgacggagctggggcggcctgtcgccgagtcctggaacagccagaaggacctcctggagcagaagcggggccgggtggacaattactgcagacacaactacggggttggtgagagcttcacagtgcagcggcgagtccatcctcaggtgactgtgtatcctgcaaagacccagcccctgcagcaccacaacctcctggtctgctctgtgagtggtttctatccaggcagcattgaagtcaggtggttccggaacggccaggaagagaaggctggggtggtgtccacgggcctgatccagaatggagactggaccttccagaccctggtgatgctagaaacagttcctcggagtggagaggtttacacttgccaagtggagcacccaagcgtaacgagcgctctcacagtggaatggagagcacggtctgaatctgcacagagcaagatgctgagtggagtcgggggctttgtgctgggcctgctcttccttggggccgggctgttcatctacttcaggaatcagaaaggacactctggacttcagccaacaggattcctgagctgaagtgcagatgacaatttaaggaagaatcttctgccccagctttgcaggatgaaaagctttcccgcctggctgttattcttccacgagagagggctttctcaggacctagttgctactggttcagcaactgcagaaaatgtcctcccttgtggcttcctcagttcctgcccttggcctgaagtcccagcattgatggcagcgcctcatcttcaacttttgtgctcccctttgcctaaaccctatggcctcctgtgcatctgtactcaccctgtaccacaaacacattacattattaaatgtttctcaaagatggagtt

SEQ ID NO: 58 - DNA, 1788 bp, Homo sapiens
gctgtcgaagcgcgcgaactcctcccggttgtagatgtatctctccaggaagcgctgtgtcccattaaacgcgtagcattcctgccgtccctggaaaagtgctagaggcccacagtttcagtctcatctgcctccactcggcctcagttcctcatcactgttcctgtgctcacagtcatcaattatagaccccacaacatgcgccctgaagacagaatgttccatatcagagctgtgatcttgagagccctctccttggctttcctgctgagtctccgaggagctggggccatcaaggcggaccatgtgtcaacttatgccgcgtttgtacagacgcatagaccaacaggggagtttatgtttgaatttgatgaagatgagatgttctatgtggatctggacaagaaggagaccgtctggcatctggaggagtttggccaagccttttcctttgaggctcagggcgggctggctaacattgctatattgaacaacaacttgaataccttgatccagcgttccaaccacactcaggccaccaacgatccccctgaggtgaccgtgtttcccaaggagcctgtggagctgggccagcccaacaccctcatctgccacattgacaagttcttcccaccagtgctcaacgtcacgtggctgtgcaacggggagctggtcactgagggtgtcgctgagagcctcttcctgcccagaacagattacagcttccacaagttccattacctgacctttgtgccctcagcagaggacttctatgactgcagggtggagcactggggcttggaccagccgctcctcaagcactgggaggcccaagagccaatccagatgcctgagacaacggagactgtgctctgtgccctgggcctggtgctgggcctagtcggcatcatcgtgggcaccgtcctcatcataaagtctctgcgttctggccatgacccccgggcccaggggaccctgtgaaatactgtaaaggtgacaaaatatctgaacagaagaggacttaggagagatctgaactccagctgccctacaaactccatctcagcttttcttctcacttcatgtgaaaactactccagtggctgactgaattgctgacccttcaagctctgtccttatccattacctcaaagcagtcattccttagtaaagtttccaacaaatagaaattaatgacactttggtagcactaatatggagattatcctttcattgagccttttatcctctgttctcctttgaagaacccctcactgtcaccttcccgagaataccctaagaccaataaatacttcagtatttcagagcggggagactctgagtcattcttactggaagtctaggaccaggtcacatgtgaatactatttcttgaaggtgtggtttcaacctctgttgccgatgtggttactaaaggttctgatcccacttgaacggaaaggtctgaggatattgattcagtcctgggtttttccctaactacaggatagggtggggtagagaaaggatatttgggggaaattttacttggatgaagattttcttggatgtagtttgaagactgcagtgtttgaagtctctgagggaagagatttggtctgtctggatcaagatttcaggcagattaggattccattcacagcccctgagcttccttcccaaggctgtattgtaattatagcaatatttcatggaggatttttctacatgataaactaagagccaagaaataaaatttttaaaatgccctaaaaaaaaaaaaaaaaaa

SEQ ID NO: 59 - DNA, 1712 bp, Homo sapiens
gctgtcgaagcgcgcgaactcctcccggttgtagatgtatctctccaggaagcgctgtgtcccattaaacgcgtagcattcctgccgtccctggaaaagtcatcaattatagaccccacaacatgcgccctgaagacagaatgttccatatcagagctgtgatcttgagagccctctccttggctttcctgctgagtctccgaggagctggggccatcaaggcggaccatgtgtcaacttatgccgcgtttgtacagacgcatagaccaacaggggagtttatgtttgaatttgatgaagatgagatgttctatgtggatctggacaagaaggagaccgtctggcatctggaggagtttggccaagccttttcctttgaggctcagggcgggctggctaacattgctatattgaacaacaacttgaataccttgatccagcgttccaaccacactcaggccaccaacgatccccctgaggtgaccgtgtttcccaaggagcctgtggagctgggccagcccaacaccctcatctgccacattgacaagttcttcccaccagtgctcaacgtcacgtggctgtgcaacggggagctggtcactgagggtgtcgctgagagcctcttcctgcccagaacagattacagcttccacaagttccattacctgacctttgtgccctcagcagaggacttctatgactgcagggtggagcactggggcttggaccagccgctcctcaagcactgggaggcccaagagccaatccagatgcctgagacaacggagactgtgctctgtgccctgggcctggtgctgggcctagtcggcatcatcgtgggcaccgtcctcatcataaagtctctgcgttctggccatgacccccgggcccaggggaccctgtgaaatactgtaaaggtgacaaaatatctgaacagaagaggacttaggagagatctgaactccagctgccctacaaactccatctcagcttttcttctcacttcatgtgaaaactactccagtggctgactgaattgctgacccttcaagctctgtccttatccattacctcaaagcagtcattccttagtaaagtttccaacaaatagaaattaatgacactttggtagcactaatatggagattatcctttcattgagccttttatcctctgttctcctttgaagaacccctcactgtcaccttcccgagaataccctaagaccaataaatacttcagtatttcagagcggggagactctgagtcattcttactggaagtctaggaccaggtcacatgtgaatactatttcttgaaggtgtggtttcaacctctgttgccgatgtggttactaaaggttctgatcccacttgaacggaaaggtctgaggatattgattcagtcctgggtttttccctaactacaggatagggtggggtagagaaaggatatttgggggaaattttacttggatgaagattttcttggatgtagtttgaagactgcagtgtttgaagtctctgagggaagagatttggtctgtctggatcaagatttcaggcagattaggattccattcacagcccctgagcttccttcccaaggctgtattgtaattatagcaatatttcatggaggatttttctacatgataaactaagagccaagaaataaaatttttaaaatgccctaaaaaaaaaaaaaaaaaa

SEQ ID NO: 60 - DNA, 1698 bp, Homo sapiens
ctgcctggggagcccccccgccccacatcctgccccgcaaaaggcagcttcaccaaagtggggtatttccagcctttgtagctttcacttccacatctaccaagtgggcggagtggccttctgtggacgaatcagattcctctccagcaccgactttaagaggcgagccggggggtcagggtcccagatgcacaggaggagaagcaggagctgtcgggaagatcagaagccagtcatggatgaccagcgcgaccttatctccaacaatgagcaactgcccatgctgggccggcgccctggggccccggagagcaagtgcagccgcggagccctgtacacaggcttttccatcctggtgactctgctcctcgctggccaggccaccaccgcctacttcctgtaccagcagcagggccggctggacaaactgacagtcacctcccagaacctgcagctggagaacctgcgcatgaagcttcccaagcctcccaagcctgtgagcaagatgcgcatggccaccccgctgctgatgcaggcgctgcccatgggagccctgccccaggggcccatgcagaatgccaccaagtatggcaacatgacagaggaccatgtgatgcacctgctccagaatgctgaccccctgaaggtgtacccgccactgaaggggagcttcccggagaacctgagacaccttaagaacaccatggagaccatagactggaaggtctttgagagctggatgcaccattggctcctgtttgaaatgagcaggcactccttggagcaaaagcccactgacgctccaccgaaagtactgaccaagtgccaggaagaggtcagccacatccctgctgtccacccgggttcattcaggcccaagtgcgacgagaacggcaactatctgccactccagtgctatgggagcatcggctactgctggtgtgtcttccccaacggcacggaggtccccaacaccagaagccgcgggcaccataactgcagtgagtcactggaactggaggacccgtcttctgggctgggtgtgaccaagcaggatctgggcccagtccccatgtgagagcagcagaggcggtcttcaacatcctgccagccccacacagctacagctttcttgctcccttcagcccccagcccctcccccatctcccaccctgtacctcatcccatgagaccctggtgcctggctctttcgtcacccttggacaagacaaaccaagtcggaacagcagataacaatgcagcaaggccctgctgcccaatctccatctgtcaacaggggcgtgaggtcccaggaagtggccaaaagctagacagatccccgttcctgacatcacagcagcctccaacacaaggctccaagacctaggctcatggacgagatgggaaggcacagggagaagggataaccctacacccagaccccaggctggacatgctgactgtcctctcccctccagcctttggccttggcttttctagcctatttacctgcaggctgagccactctcttccctttccccagcatcactccccaaggaagagccaatgttttccacccataatcctttctgccgacccctagttccctctgctcagccaagcttgttatcagctttcagggccatggttcacattagaataaaaggtagtaattagaacaaaaaaaaaaaaaaaaaa

SEQ ID NO: 61 - DNA, 4055 bp, Homo sapiens
gtcacagaagactacttgggttcatggtctctaatatttcaaacaggagctccctttagcgagtccttcttttcctgactgcagctcttttcattttgccatccttttccagctccatgatggttctgcaggtttctgcggccccccggacagtggctctgacggcgttactgatggtgctgctcacatctgtggtccagggcagggccactccagagaattaccttttccagggacggcaggaatgctacgcgtttaatgggacacagcgcttcctggagagatacatctacaaccgggaggagttcgcgcgcttcgacagcgacgtgggggagttccgggcggtgacggagctggggcggcctgctgcggagtactggaacagccagaaggacatcctggaggagaagcgggcagtgccggacaggatgtgcagacacaactacgagctgggcgggcccatgaccctgcagcgccgagtccagcctagggtgaatgtttccccctccaagaaggggcccttgcagcaccacaacctgcttgtctgccacgtgacggatttctacccaggcagcattcaagtccgatggttcctgaatggacaggaggaaacagctggggtcgtgtccaccaacctgatccgtaatggagactggaccttccagatcctggtgatgctggaaatgaccccccagcagggagatgtctacacctgccaagtggagcacaccagcctggatagtcctgtcaccgtggagtggaaggcacagtctgattctgcccggagtaagacattgacgggagctgggggcttcgtgctggggctcatcatctgtggagtgggcatcttcatgcacaggaggagcaagaaagttcaacgaggatctgcataaacagggttcctgagctcactgaaaagactattgtgccttaggaaaagcatttgctgtgtttcgttagcatctggctccaggacagaccttcaacttccaaattggatactgctgccaagaagttgctctgaagtcagtttctatcattctgctctttgattcaaagcactgtttctctcactgggcctccaaccatgttcccttcttcttagcaccacaaataatcaaaacccaacatgactgtttgttttcctttaaaaatatgcaccaaatcatctctcatcacttttctctgagggttttagtagacagtaggagttaataaagaagttcattttggtttaaacataggaaagaagagaaccatgaaaatggggatatgttaactattgtataatggggcctgttacacatgacactcttctgaattgactgtatttcagtgagctgcccccaaatcaagtttagtgccctcatccatttatgtctcagaccactattcttaactattcaatggtgagcagactgcaaatctgcctgataggacccatattcccacagcactaattcaacatataccttactgagagcatgttttatcattaccattaagaagttaaatgaacatcagaatttaaaatcataaatataatctaatacactttaaccattttctttgtgtgccatcacaaatactccttaaccaaatacggcttggacttttgaatgcatccaatagacgtcatttgtcgtctaagtctgcattcatccaccagcctaggcctcctgtcttaattttcatacagacagaaatgactccccactggggaaagagcaaagcaatacatgtagcactctttttcaaacactggtctttttttttttcttaacaatccaacattgttatgtgttttgcgtctcatattgacaccttttggtcaaggtagaggacatgtttgttgtaagctttctttttcgtgtagaggatggattcttcactcctgatacacacaatcagtgcacagcagctctcttatacatccagttgatgccttcagtctccctggcttcttacaagcatcttctgggccttgtgtgtccctgggcacctgtccctggtcaattcccgaaagctactgtgctcctcttgcccatctccccttgcaaataatatcttccatcgggggaccggcttcctccaatttcaggagaggtggggctgaaggcacagacttgggcgtcactggcacagatataagtaaatacagctggagtctgcagagaggctggactgagtcagggagtcaggaaagagaagccacacacaaggacaaccaatcatgtttctcataatcttcttaacctagggaataggacacaatcattttttctttttaaaacatctttatccctgatcagcctcatttcctcaaaaactataaaggaaaatgctgctgacttgtttttgcgtagtaatttcagctgtcacataataagctaaggaagacagtatatagtaaataaggaccctttatctgtcttattttcccttttggcttcacaggaaacttgtgagaaacctatgcagcataaaattaatatgatttcaatccagggattcaacgatggaaggaggtcatgagaatagcagaaagtcttcaaatcgagatcattatgaaatcctcagacccagagcacataaatcctaccctcagagtcactgagcagttaacattacaaattacaaaccatatccagtcagagtcattctctttcctgcttgtctcctgtactcatgttacaggttagggcagtaccccgagtggagtgaacaatctctggactaacacttgtcaggatcagaagctgaggtatctgcacccacattacaggaacaggatatgtgctcctagggaactgagggtgtcaggagatgaggaatgtccctggagtcacagaaagaaggtatcagatgtgtctcactctgacatatgcaggtgtttatgaaactctgggatttctaaggaaggatgcagtgcagagacaggtcccagaggagacaagagctgagagaccatccaaactgggaccaccttgtcactagacttcaaattttcaatattgatagagtgttttctaagagtcaggccctttgctgagtgctatgtgcagcaggatcaaaggcagccaggaggtagaggagtcttgaggtacatcagtcattggagttgaagagcagagattcaaaggaaagttggaactggagctttaaaggagatgtgaagtgggtgactcaacctctgactcagaaaaattgatacctgcagaagaaaaaacccggcgggcttaggactcccagctgagtgttgtatcctccatccctttccacctggtcccttcattttctacccctcacagttccctaacgagaaggtggtccacccaacagacaacactgcctcagatggttatcaaggggtaccctaagaagaaatcatctcaccctctctttgtccccatttgtcaagtagcagtgaggccgagccaggggatggtgaaagtggaaggaggtgggagttgggcatcgggtgtgaagatgctcttgaaaggggttttaataaccacttgctaccaggccagtgaacacttaccatagttgatgccttttgagcatgttgcattgtaaactgtccctgaaattactgtgcacttggcttatgggatgaaacatcctcctagttcttttgtctctcagcttctctgaagtctcattgagcaccttctcttcaatttcttttacacagtaagaataggatcagctgtgctaaactaacaaatacccagatatccaggtttggctcatgttacacgtccaaagtaagtcatgcaggaagctctgctcatcatcgtactcaggaagtcaggctgacagtctttctcctgcacatctgctcccagaacctccccagcagaatgaagggaacctaagaatttattcactggcttttaatgatccctcctagaaagaacacacttctcgcatttcattttccaatgtaaatcatatggctgcaactaacttcaaataagtgggaatacttgaaggtggaaaacatttaagaagtacacactaaataaataataaaatacttctacaagaga

SEQ ID NO: 62 - DNA, 1312 bp, Homo sapiens
ttttaatggtcagactctattacaccccacattctcttttcttttattcttgtctgttctgcctcactcccgagctctactgactcccaacagagcgcccaagaagaaaatggccataagtggagtccctgtgctaggatttttcatcatagctgtgctgatgagcgctcaggaatcatgggctatcaaagaagaacatgtgatcatccaggccgagttctatctgaatcctgaccaatcaggcgagtttatgtttgactttgatggtgatgagattttccatgtggatatggcaaagaaggagacggtctggcggcttgaagaatttggacgatttgccagctttgaggctcaaggtgcattggccaacatagctgtggacaaagccaacctggaaatcatgacaaagcgctccaactatactccgatcaccaatgtacctccagaggtaactgtgctcacaaacagccctgtggaactgagagagcccaacgtcctcatctgtttcatagacaagttcaccccaccagtggtcaatgtcacgtggcttcgaaatggaaaacctgtcaccacaggagtgtcagagacagtcttcctgcccagggaagaccaccttttccgcaagttccactatctccccttcctgccctcaactgaggacgtttacgactgcagggtggagcactggggcttggatgagcctcttctcaagcactgggagtttgatgctccaagccctctcccagagactacagagaacgtggtgtgtgccctgggcctgactgtgggtctggtgggcatcattattgggaccatcttcatcatcaagggattgcgcaaaagcaatgcagcagaacgcagggggcctctgtaaggcacatggaggtgatggtgtttcttagagagaagatcactgaagaaacttctgctttaatggctttacaaagctggcaatattacaatccttgacctcagtgaaagcagtcatcttcagcattttccagccctatagccaccccaagtgtggatatgcctcttcgattgctccgtactctaacatctagctggcttccctgtctattgccttttcctgtatctattttcctctatttcctatcattttattatcaccatgcaatgcctctggaataaaacatacaggagtctgtctctgctatggaatgccccatggggcatctcttgtgtacttattgtttaaggtttcctcaaactgtgatttttctgaacacaataaactattttgatgatcttgggtggaaaaaaaaaaaaaaaaaaaaaaaaaaaaaaaaaa

SEQ ID NO: 63 - DNA, 3485 bp, Homo sapiens
cttcttctttacctccgccttgttcctgtcctcaccacacggactgagactgatttgattaaagcaccagagtgtaatggccctcagagcagggctggtcctggggttccacaccctgatgaccctcctgagcccgcaggaggcaggggccaccaaggctgaccacatgggctcctacggacccgccttctaccagtcttacggcgcctcgggccagttcacccatgaatttgatgaggaacagctgttctctgtggacctgaagaaaagcgaggccgtgtggcgtctgcctgagtttggtgactttgcccgctttgacccgcagggcgggctggccggcatcgccgcaatcaaagcccatctggacatcctggtggagcgctccaaccgcagcagagccatcaacgtgcctccacgggtgaccgtgctccccaagtctcgggtggagctgggccagcccaacatcctcatctgcatcgtggacaacatcttcccccctgtgatcaatatcacctggctgcgcaacggccaaactgtcactgagggagtggcccagaccagcttctattcccagcctgaccatttgttccgcaagttccactacctgcccttcgtgccctcagccgaggacgtctatgactgccaggtggagcactggggcctggatgcgccactcctcaggcattgggagctccaggtgcctattccaccaccagatgccatggagaccctggtctgtgccctgggcctggccatcggcctggtgggcttcctcgtgggcaccgtcctcatcatcatgggcacatatgtgtccagtgtccccaggtaatgatccttctgagagaaatgacttgtgggagacaccctgcagatcctcatgggtttgtgacagcccctgcgtgctcagtgccctttaagtgcatcccgctgtgctgactttgagtgggatcaacatctgtcctacgggtcccctcttttttggccccagtattcatggcagggtttgttggacacctactagcttcccttcccattcaacacacacacacattcttgctctacccaaagctctggctggcagcactaaatgctttggtggtgtttgcactgtgtcctttccaggccttggccagttcttccaggggtgaggcatgtggtgctggggattggcagccatcctggggcccacacaggtgtgtcttgctccatttggcccattgtgtgttactttgtgaatgagccatttcacatggacttcatgaaatttgcctcctgagttcaggtttaccctgaaagggatgcagattatcctgttcctcacgaccccctcagctaacaacagttctgaagggtgctgggacaggacaggctcatggggactccactcctgcctgggtttactctgtatgaagaggccactggtatcctgccatgatgttatctcctttttctacttttccctagagtcccatgcatgataaagagaggcccaaggcttggataaggtggccacttccctcagtggagtcagtcatgttaggtaggaggtggtagagtcggtctgcgaggtatctcgtaagaggggaggtccacctagacacactctaaatatgtggcctagaagattttggtctacttttctgtgaacagaatttaaaacatacaaagagataaatcaccataccacatagtttatgtcaggaccaaaatgagcaatacagattacggttttcaaaccagaatgcacataagaactgcttgggatccttttaaaagtacaggcattggcctggtgcagtggctcattcctgtaatcccagcactttgggaggccaaggggacaggactgcttgaggccaagaggtggaaaccatcttgggctacatagagagaccccatctctacaaagaaagatttaaaaattaaccaggcatggtggctcgcacctgtattcccagccactggggaggctgaggccggaggagtgcttgagcccaggagttcaaggctgcagtgagccaagattgcgccactgcactccagcctaggtgacagagtgagaccctgtctctaaataaataaataaataaaatataaaaataacagtcatcacccagacctactgaattagaatctcgggagtgcagggggcagcaacagggaggctgtcttttctgagatggggtctcactctgtcaccaggctggagtgccatggcatgatctcagctcactgcaacctccacctcctgagttcaagccattctcctgcctcagcctcctgagtagctgggactacaggtgtgcgccactacactcagctaatttttgtattttaagtagagacggggtttcatcatgttggccaggatggcctccatctcttgacctcgtgatccacccaccttccctcccaaagtactggaattacaggcattagccactgtgcccagccgaggctgtcatttttaaccggctctggatgactctgatgcagccatcctggaccttggctgtggtctggtaactggaacccagtgacgtaatcaggtgccatcgggggtcatgggaaagggggatccccaaggtctgaggtggactaggaaggctttctgaagaacctgggtctgttagggcatcagccaatcaaggtacaagtaaatagaggcaaaatgagggtttgaactgtgagcagttggtcctggaaaagaaagaaaccaagagattatggggactcaatgggcttcttaagagagaataagttgaaatcaatgaccagaagaccctgatggaagtggaggagaatcatctcaggcaaactttttgtgtgccagtaacagaaaccctctttgtgtgatcacatgcaaagtataggatatttgcaatatagccatggggaggagtgcagggcccaagggtagattttagccaggcctcccaggaacagaactcggatccgaaaagcccagagaagctagagctgcccctccaacactctcggatccacatggtctgtgttctctagacccccctgcatgttagcggtgttctctctctgtggactgactgtccttctcagtgaacatgtccacccgacagctcctgagtttatatcatctcaaccctcacaacccacagaggctgtgtctcctagtcacagctttaaattactggaaaaataaatgactggccaaacttggagcaggtgtccatcccagccctgtgtagttagagcaggaatcaagatctcaacacaaatgtggctgccaagcactcagccccggggcgaggggtcaagttcttctcagagaaagaggaataagttggttctcagaagacatcacaagatacgtgtgtacccaacaatctctgatctctgctgatcttttgcttagacgttaacttgatgcatcattggaaaggtgtttctctcatctctgtcctaaggcttgataaagtcattaaaattgtgttcttttgactaaa

SEQ ID NO: 64 - DNA, 1122 bp, Homo sapiens
tccggcaggtacataagatccattaggtttgagctgtgttgactaccactgctttttccttggtctcacttacgtcttggaagatggctctgcagatccctggaggcttttgggcagcagctgtgaccgtgatgctggtgatgctgagcaccccagtggctgaggccagagactttcccaaggatttcttggtccagtttaagggcatgtgctacttcaccaacgggacagagcgcgtgcgcggtgtggccagatacatctataaccgcgaggagtacgggcgcttcgacagcgacgttggggagttccaggcggtgaccgagctggggcggagcatcgaggactggaacaactataaggacttcttggagcaggagcgggccgcggtggacaaggtgtgcagacacaactacgaggcggagctgcgcacgaccttgcagcggcaagtggagcccacagtgaccatctccccatccaggacagaggccctcaaccaccacaacctgctggtctgctcggtgacagatttctatccagcccagatcaaagtccggtggtttcggaatgaccaggaggagacagccggtgttgtgtccacctccctcattaggaatggtgactggaccttccagattctggtgatgctggaaataactccccagcgtggagacatctacacctgccaagtggagcaccccagcctccagagccccatcaccgtggagtggcgacctcgagggcctccaccagcaggactcctgcactgactcctgaggacttttgtctgggattggtcatcactcttctgtaatgcccacctgcccctgcccagaattcctagctgcctgtgtcaccctgtcccactgaggtcagagtcctacagtggctcatgcagccacaggtcaccttctgtgatccccatcccaaggcactggtggtgactctgcttcctgcactgacccagagcctctgcctgtgcactgcaagctgtgtctactcaggccccaaggggcatctctgtttccattctccccccacagacctgtcaagagaagcatgacaaacaaaatcatttacctgactttagtgctttttcccataattaaacctgattctgagtta

SEQ ID NO: 65 - DNA, 7584 bp, Homo sapiens
agaatcttctgtaggcctttctcttgccttcttttattcacaactgatgacactgcatatcttcccctgttcttattgggagaaggccttgtgtgtcaccaagaggttctcagaagggacctgtcagtttttggttaaaagaacccggaaagagaaggactatgggggaactgatggcgttcctgttacctctcatcattgtgttaatggtgaagcacagcgattcccggacgcactctctgagatattttcgcctgggcgtttcggatcccatccatggggtccctgaatttatttcggttgggtacgtggactcgcaccctatcaccacatatgacagtgtcactcggcagaaggagccacgggccccatggatggcagagaacctcgcgcctgatcactgggagaggtacactcagctgctgaggggctggcagcagatgttcaaggtggaactgaagcgcctacagaggcactacaatcactcagggtctcacacttaccagagaatgattggctgtgagctgctggaggatggaagcaccacaggatttctgcagtatgcatatgacgggcaggatttcctgatcttcaataaagacaccctctcctggctggctgtagataatgtggctcacaccatcaagcaggcatgggaggccaatcagcatgagttgctgtatcaaaagaattggctggaagaagaatgtattgcctggctaaagagattcctggagtatgggaaagacaccctacaaagaacagaatcagaaactatccctcttgtgatgaaagctgtctctgggtccattgtccttgtcattgtgctggctggagttggtgttctagtctggagaagaaggccccgagagcaaaatggagccatctaccttccaacaccagatcgatgattgcagatccctcttttccagttctccttcctctaggagccatgttatcctctgtcccccatagagtcaagcctagtgcttgaaggtcctgacgacacccacaacatacatgagagtaatgggattgagcatttatggcagcaacagaggagccacaaaatgttctttgttctttggctccaaaaagactgtcagctttcagtctcttttgatggactgttttatcagagttgactttaaatacagcttgtctcatgacacaacgcttccctacattctatttgtcaatgatgatttgcaactagttggagattctcagagcaggaaggaatcttttcaaccagagcaggaactgtcttctgcaatgccttggacttgagcctccagcctccacttgaacaccatgtgaagggaacctcagtacttcataaaatggcctttctcattcatctttcatgggaacatttattgtacaagcgctttgaatatcatgggcaccatgactgtgaccctacaggtaggattggatcactccatgagagtagccggcaggtttctacaatggcctgggaatggactgattatttttatacattttctggcctgagagaaagccaaagtcccctgctgttcacagcaaccctgcctgggagcttggaatcttggtaatctgcccggttggatctatggaggtagtctcaccctttttgtcttttgtgggaaattaagagaaataattatcagacatatcatcacctccagtggaactacagagacctggacccagctgcactattttaatgtaaaaataacagtatggccaggtgcagtggctcacgcctgtaatcccatcactttgagcagccaaggcgggcggatcacgaggtcaggagattaagaccatcctggccaatatggtgaaaccctgtctctactaaaatacaaaaaattagctgggcatggtgttgcgtgcctgtagtcccagctacttgggaggctgagacaggggaattgcttgaacccgggaggcagagattgcagtgagccgagatcacgccactgcactccagcctggcgacagagtgagactctatctcaaaataataataataataataataataataataataataataacagtatatttggtgtcaggagagggctcaattctcatttctgcctttcctgtgctggctcatggtagctgggcatgacttgccttcctacataggttgtcttcatacatatgcactgggaatcaataaaagcccatggtgagaatgaacatccccttaatgttccttactatccccaacccctgaggcctcacctactgccctgccatgtggagctacttgccctggggctgccagtcacacattcctcggtcctacttctctgaccccgtttgactctgcacctgagccctaatgcttacttcagtgacctgaactttgacaagtggcttttgtcctgcacctcaggtttgacctctgctctcccttgaccttgactgtgacatttgacctttggctttaatcattacagcctcagataaaggtaccttcagcccgggcacagtggctcacgcctgtaatcctagcactttgggaggctgaggcaggcggattccctgagctcaggagttcaagaccagcctgggcaacacggtgaaaccctgtctctactaaaatacaaataattagctgggcatggtggcatgtgcctatagtcccagctacttgggaggctaaggcaggagaatcacttgaatctataaggcagaggtggcagtgagccgagatcacaccactgcactccagcctgggcaacggagcaagactctgtctccaaaaaaaaaaagaaagataccctcagtgtgccaggcctctaagagctcacctgccaggcttcctccttgctccactgtcccatgtaattccatatatgaagctaccactgtacatctctcttttccggtgcctgttgagttgcatagaagcacagttgtgtttattttgtttttagggttgccatgggcaatttccgtgccacttttaagcagtgttgcactgtgaagagaatgtaggcaagtttatttctggaatggtttcttcttacaatcagaatagttaggatgtaatatatttttgggtgggcatttaaagtgaaaaggtacatatttacatagacacaggtgataatgtatctatgtaaatgccttttgattctgcaactgcaggatactctcatcaaagacacagataaaaagcctctgtgtttccaaggccttgccctacacctaacacataatatgtccaaatggatgaagaggaggcaaggacaaggatgtgatgacaaaacattctgttatgcacttgtagcatttatgtttcttcctgggggattttataatactaaaagaatcataatataaagagatgattaaaaaaaaaatactgccgggcacggtggctcatgcctgtaatcccagcattttgggaggccgaggtgggcagatcacctgaggtcgggagttcgagaccagcctgaccaacatggagaaaccctgtctctaccaaacatacaaaattagccggggatggtggcgcatgcctataatcccagctactcgggagtctgaggcagaagaaccgcttgaacccgggaggcagaggttgtggtgagccgagatcgcgccatcgcactctagcctgggcaacaagagtgaaactccatctcaaaaaaataaaaataaaataagtaagtaatacctaaaattctgcaaccttcattttactatagatggttgaagattatattacttcttaattgttttagccttgttattgcttcattacttcatggttgttgagtacagatgctcagtaatcataacctatgaaatatttgacaccatgatctaaacattaaaaacaaataactgtgctattgccacagctatgttttggctttgaattttctttactgaatattttggatcaagaacactagatgagaaacctgttcaactctgttcttttttttttttttaactccactgtatttattacctgtttttgttttttttgtttgtttgtttttgatgtgcatatagaccaagatgtggtaaatttaaatggcagatgtttttgatgtggtacatttaagggagagaaagcagtttaaagagcagggtgaaaaatccaacaagactccatcgagagtttctgagctctcccatcaggggccagtcctcctttcctctctcctcttactcccatgatttccaagttgtgatcctttccttatttctgaggaatgacttggtttctcctcttctttttttggcctgagagaagatgtttttgcacttgtagctatgaggaacagattgtccactagggaggccagctgatcattttctgccagagtcacacagagcagtcacaccttattttgaaaaccactgtctggggtctttgtcctcacatatgcaggtctagtgtccccacaaagtgatcagatggatatataaagtggagtgccaatgtattaatttactgtgagaaacacaattgctaagtgggtcagatatctgtctcagctggtcagtacaccttccagcaggaaaatctacataagaacaactaaatcacaatctgtagagtgcttgatgaccccagaattggtgcaaggggacacattcttgcttgttagcacctgctctctggagtttgctattttctcacacacagtgtattagttcacagaatgttctccaaggaggacagggggctttgcccatagccatgtgctgtgggcagcagagctaggaagaagcacaggcatctcccagcccaggtgtttcccacttaactgcattgcccttttcatcttttttttttccccaatagcttcaggacattcagtacattgtgctttttagaggttgatgattccactgcctgagctgccttcacctctctttctttggaaattgccatctttgagcattgtatgtctctgtaacatctctgcatctccttttcactctggcctccctttctccattgtccttctagcttctggttgccccaaaccccacagactgtgtaacaaaacccaaaacctattggtttaaaacaatacccattttattttctttcatagtttctatgggtcaggaatttggatatggcttgggtaagcagttctggcttctcatggagttggaggcaagtggtggctggaacagaaatggggcagccaggggtggtggccaggcatcagctacatctcctccatgtagtctcaggaactctccatgtaatctctctgtgtgggttgggcttcctcacaacatggtggcctcagggcagtcactgcttacatggcagctagcttccctcagagtgagtatcccaagagatcacagtcaaagtgcatagcatttatataatctaatcttggaagtcacaaaatgtcattcttgtgatactctcattggtgaagaagtcataaaatcctgctcaggttcaaaaagagggtgtatagaacccaacactcaataggaagattgtcagagttacattgtaagaagagcatgtagttgggagatatcattgtggccattttgggaaagatgcaacatgtcacaatgtcatgttctccatcgtctccccgttccaccttgtactggtttccaagggtagtcgtttaaaagtaccacaaaaactgggtggcttggaacaacagaaatttattgtttcacagttctggaggccagaagttcaaaatgaagtgttggcagaaacatgctgcctctaaagggactgggaaaggatctgttccaggcttccctcctatcttctggttgttccttgccttctggctgcgtaactctagtcttcatttggtgttctccctgcatgcatggctttgtgtccaaatttccttttttcatgaggccatcagtcatactggattagggacccactctactactgcaggatgacctcaccttcccaaattacatctgcaacaaccctatttccaaagaaggccacattctgaggtactgggggttataacttcaacatgaattttttggaggaaacaattcaactcctaacacatctctacccaacctctgtaggttccctcaatccaccaaaattttttggctccactggattatctagcagttaggaaaccaagatcattaaatgaattcaccgcaactacagtgagactgactaccttagcttacctctgtgaaaggagttaagccaaaggaatctgtggaattttggagagtttgggagcatttgggggcaggaggcaaatgttcttcctttaaatcacaacacttagttctcttccatttataagactcacccctccatcccaacccctgcaccacaggacaaggaagtgttcttggtcttcaactttcatccctgatggtgaaagcagttgctcctgacctatttgcccaccagcttctcctctggagcctgaggcttctgatgcctgcctggctggttctcagtaagaaggtcaagttcaaccagaggggagatgctgatgcctttcagtacttaaatatgagttcagaccctggggcctggacataagatttggggtcccctggatataagatttctgaaaacactcagactgtggagacccctgctgagggagaagccccaaactgtggcttcaggggaatgcaccaaggctctcattgaggccaccttctccaacaagctcccctcctgcttccccatggctggcatggctgaggaaaaaggacactgagcacagcccgtgcatgagcggcttgccatgcaacaggataaaacccataatgccactcagcaagccttggttgtaaatctagtttgattacatttgtaatcaaatgatggccatttgttctgtttctggtttgtgaaccaactgaagacataagcagggcctcagctaacccacaaatagcacatgtgtgcaaactggaaaaatgaacccttcttctgggaggacgccagcccaggccaggtcacccggcttggccagcagaacacagagtagattttggtcccgtttgttccccagtggggtatctatccttgtgcagggcacaagcctacatggtggctctggtcatatcattagaaaatagacagaaatgggctgcacaccagaatgaatgaattgaattgaaagggaggagtgatggtggaaaaaaaaacaagtcaattcatttagactggtagaaccagaaccactgtgtagtacatccaaacggttaaaattccctggaagatgttacataatcctatcatggtgtttatttatggaaatctattttaaaaattttatgtaatactgcacagtctgtttgcatgatgccttgtacgtagtagcaactcagtaaatactttttgaatgaactagtatagtattttaattagctagtcttcatgtactggtacaaaagaacagtgtcatcttacagctgaagtcatagaggggaaatatcccactcaagatcatataacattccaggtactcaggatgaatggtttgaggactggtctgaattcttcaaaggtttcagctgtattaacattctccatctaataaactttatcttgtcattgca

SEQ ID NO: 66 - DNA, 7725 bp, Homo sapiens
agaatcttctgtaggcctttctcttgccttcttttattcacaactgatgacactgcatatcttcccctgttcttattgggagaaggccttgtgtgtcaccaagaggttctcagaagggacctgtcagtttttggttaaaagaacccggaaagagaaggactatgggggaactgatggcgttcctgttacctctcatcattgtgttaatggtgaagcacagcgattcccggacgcactctctgagatattttcgcctgggcgtttcggatcccatccatggggtccctgaatttatttcggttgggtacgtggactcgcaccctatcaccacatatgacagtgtcactcggcagaaggagccacgggccccatggatggcagagaacctcgcgcctgatcactgggagaggtacactcagctgctgaggggctggcagcagatgttcaaggtggaactgaagcgcctacagaggcactacaatcactcagataatgtggctcacaccatcaagcaggcatgggaggccaatcagcatgagttgctgtatcaaaagaattggctggaagaagaatgtattgcctggctaaagagattcctggagtatgggaaagacaccctacaaagaacagagcccccactggtcagagtaaatcgcaaagaaacttttccaggggttacagctctcttctgcaaagctcatggcttttaccccccagaaatttacatgacatggatgaaaaacggggaagaaattgtccaagaaattgattatggagacattcttcccagtggggatggaacctatcaggcgtgggcatcaattgagcttgatcctcagagcagcaacctttactcctgtcatgtggagcactgcggtgtccacatggttcttcaggtcccccaggaatcagaaactatccctcttgtgatgaaagctgtctctgggtccattgtccttgtcattgtgctggctggagttggtgttctagtctggagaagaaggccccgagagcaaaatggagccatctaccttccaacaccagatcgatgattgcagatccctcttttccagttctccttcctctaggagccatgttatcctctgtcccccatagagtcaagcctagtgcttgaaggtcctgacgacacccacaacatacatgagagtaatgggattgagcatttatggcagcaacagaggagccacaaaatgttctttgttctttggctccaaaaagactgtcagctttcagtctcttttgatggactgttttatcagagttgactttaaatacagcttgtctcatgacacaacgcttccctacattctatttgtcaatgatgatttgcaactagttggagattctcagagcaggaaggaatcttttcaaccagagcaggaactgtcttctgcaatgccttggacttgagcctccagcctccacttgaacaccatgtgaagggaacctcagtacttcataaaatggcctttctcattcatctttcatgggaacatttattgtacaagcgctttgaatatcatgggcaccatgactgtgaccctacaggtaggattggatcactccatgagagtagccggcaggtttctacaatggcctgggaatggactgattatttttatacattttctggcctgagagaaagccaaagtcccctgctgttcacagcaaccctgcctgggagcttggaatcttggtaatctgcccggttggatctatggaggtagtctcaccctttttgtcttttgtgggaaattaagagaaataattatcagacatatcatcacctccagtggaactacagagacctggacccagctgcactattttaatgtaaaaataacagtatggccaggtgcagtggctcacgcctgtaatcccatcactttgagcagccaaggcgggcggatcacgaggtcaggagattaagaccatcctggccaatatggtgaaaccctgtctctactaaaatacaaaaaattagctgggcatggtgttgcgtgcctgtagtcccagctacttgggaggctgagacaggggaattgcttgaacccgggaggcagagattgcagtgagccgagatcacgccactgcactccagcctggcgacagagtgagactctatctcaaaataataataataataataataataataataataataataacagtatatttggtgtcaggagagggctcaattctcatttctgcctttcctgtgctggctcatggtagctgggcatgacttgccttcctacataggttgtcttcatacatatgcactgggaatcaataaaagcccatggtgagaatgaacatccccttaatgttccttactatccccaacccctgaggcctcacctactgccctgccatgtggagctacttgccctggggctgccagtcacacattcctcggtcctacttctctgaccccgtttgactctgcacctgagccctaatgcttacttcagtgacctgaactttgacaagtggcttttgtcctgcacctcaggtttgacctctgctctcccttgaccttgactgtgacatttgacctttggctttaatcattacagcctcagataaaggtaccttcagcccgggcacagtggctcacgcctgtaatcctagcactttgggaggctgaggcaggcggattccctgagctcaggagttcaagaccagcctgggcaacacggtgaaaccctgtctctactaaaatacaaataattagctgggcatggtggcatgtgcctatagtcccagctacttgggaggctaaggcaggagaatcacttgaatctataaggcagaggtggcagtgagccgagatcacaccactgcactccagcctgggcaacggagcaagactctgtctccaaaaaaaaaaagaaagataccctcagtgtgccaggcctctaagagctcacctgccaggcttcctccttgctccactgtcccatgtaattccatatatgaagctaccactgtacatctctcttttccggtgcctgttgagttgcatagaagcacagttgtgtttattttgtttttagggttgccatgggcaatttccgtgccacttttaagcagtgttgcactgtgaagagaatgtaggcaagtttatttctggaatggtttcttcttacaatcagaatagttaggatgtaatatatttttgggtgggcatttaaagtgaaaaggtacatatttacatagacacaggtgataatgtatctatgtaaatgccttttgattctgcaactgcaggatactctcatcaaagacacagataaaaagcctctgtgtttccaaggccttgccctacacctaacacataatatgtccaaatggatgaagaggaggcaaggacaaggatgtgatgacaaaacattctgttatgcacttgtagcatttatgtttcttcctgggggattttataatactaaaagaatcataatataaagagatgattaaaaaaaaaatactgccgggcacggtggctcatgcctgtaatcccagcattttgggaggccgaggtgggcagatcacctgaggtcgggagttcgagaccagcctgaccaacatggagaaaccctgtctctaccaaacatacaaaattagccggggatggtggcgcatgcctataatcccagctactcgggagtctgaggcagaagaaccgcttgaacccgggaggcagaggttgtggtgagccgagatcgcgccatcgcactctagcctgggcaacaagagtgaaactccatctcaaaaaaataaaaataaaataagtaagtaatacctaaaattctgcaaccttcattttactatagatggttgaagattatattacttcttaattgttttagccttgttattgcttcattacttcatggttgttgagtacagatgctcagtaatcataacctatgaaatatttgacaccatgatctaaacattaaaaacaaataactgtgctattgccacagctatgttttggctttgaattttctttactgaatattttggatcaagaacactagatgagaaacctgttcaactctgttcttttttttttttttaactccactgtatttattacctgtttttgttttttttgtttgtttgtttttgatgtgcatatagaccaagatgtggtaaatttaaatggcagatgtttttgatgtggtacatttaagggagagaaagcagtttaaagagcagggtgaaaaatccaacaagactccatcgagagtttctgagctctcccatcaggggccagtcctcctttcctctctcctcttactcccatgatttccaagttgtgatcctttccttatttctgaggaatgacttggtttctcctcttctttttttggcctgagagaagatgtttttgcacttgtagctatgaggaacagattgtccactagggaggccagctgatcattttctgccagagtcacacagagcagtcacaccttattttgaaaaccactgtctggggtctttgtcctcacatatgcaggtctagtgtccccacaaagtgatcagatggatatataaagtggagtgccaatgtattaatttactgtgagaaacacaattgctaagtgggtcagatatctgtctcagctggtcagtacaccttccagcaggaaaatctacataagaacaactaaatcacaatctgtagagtgcttgatgaccccagaattggtgcaaggggacacattcttgcttgttagcacctgctctctggagtttgctattttctcacacacagtgtattagttcacagaatgttctccaaggaggacagggggctttgcccatagccatgtgctgtgggcagcagagctaggaagaagcacaggcatctcccagcccaggtgtttcccacttaactgcattgcccttttcatcttttttttttccccaatagcttcaggacattcagtacattgtgctttttagaggttgatgattccactgcctgagctgccttcacctctctttctttggaaattgccatctttgagcattgtatgtctctgtaacatctctgcatctccttttcactctggcctccctttctccattgtccttctagcttctggttgccccaaaccccacagactgtgtaacaaaacccaaaacctattggtttaaaacaatacccattttattttctttcatagtttctatgggtcaggaatttggatatggcttgggtaagcagttctggcttctcatggagttggaggcaagtggtggctggaacagaaatggggcagccaggggtggtggccaggcatcagctacatctcctccatgtagtctcaggaactctccatgtaatctctctgtgtgggttgggcttcctcacaacatggtggcctcagggcagtcactgcttacatggcagctagcttccctcagagtgagtatcccaagagatcacagtcaaagtgcatagcatttatataatctaatcttggaagtcacaaaatgtcattcttgtgatactctcattggtgaagaagtcataaaatcctgctcaggttcaaaaagagggtgtatagaacccaacactcaataggaagattgtcagagttacattgtaagaagagcatgtagttgggagatatcattgtggccattttgggaaagatgcaacatgtcacaatgtcatgttctccatcgtctccccgttccaccttgtactggtttccaagggtagtcgtttaaaagtaccacaaaaactgggtggcttggaacaacagaaatttattgtttcacagttctggaggccagaagttcaaaatgaagtgttggcagaaacatgctgcctctaaagggactgggaaaggatctgttccaggcttccctcctatcttctggttgttccttgccttctggctgcgtaactctagtcttcatttggtgttctccctgcatgcatggctttgtgtccaaatttccttttttcatgaggccatcagtcatactggattagggacccactctactactgcaggatgacctcaccttcccaaattacatctgcaacaaccctatttccaaagaaggccacattctgaggtactgggggttataacttcaacatgaattttttggaggaaacaattcaactcctaacacatctctacccaacctctgtaggttccctcaatccaccaaaattttttggctccactggattatctagcagttaggaaaccaagatcattaaatgaattcaccgcaactacagtgagactgactaccttagcttacctctgtgaaaggagttaagccaaaggaatctgtggaattttggagagtttgggagcatttgggggcaggaggcaaatgttcttcctttaaatcacaacacttagttctcttccatttataagactcacccctccatcccaacccctgcaccacaggacaaggaagtgttcttggtcttcaactttcatccctgatggtgaaagcagttgctcctgacctatttgcccaccagcttctcctctggagcctgaggcttctgatgcctgcctggctggttctcagtaagaaggtcaagttcaaccagaggggagatgctgatgcctttcagtacttaaatatgagttcagaccctggggcctggacataagatttggggtcccctggatataagatttctgaaaacactcagactgtggagacccctgctgagggagaagccccaaactgtggcttcaggggaatgcaccaaggctctcattgaggccaccttctccaacaagctcccctcctgcttccccatggctggcatggctgaggaaaaaggacactgagcacagcccgtgcatgagcggcttgccatgcaacaggataaaacccataatgccactcagcaagccttggttgtaaatctagtttgattacatttgtaatcaaatgatggccatttgttctgtttctggtttgtgaaccaactgaagacataagcagggcctcagctaacccacaaatagcacatgtgtgcaaactggaaaaatgaacccttcttctgggaggacgccagcccaggccaggtcacccggcttggccagcagaacacagagtagattttggtcccgtttgttccccagtggggtatctatccttgtgcagggcacaagcctacatggtggctctggtcatatcattagaaaatagacagaaatgggctgcacaccagaatgaatgaattgaattgaaagggaggagtgatggtggaaaaaaaaacaagtcaattcatttagactggtagaaccagaaccactgtgtagtacatccaaacggttaaaattccctggaagatgttacataatcctatcatggtgtttatttatggaaatctattttaaaaattttatgtaatactgcacagtctgtttgcatgatgccttgtacgtagtagcaactcagtaaatactttttgaatgaactagtatagtattttaattagctagtcttcatgtactggtacaaaagaacagtgtcatcttacagctgaagtcatagaggggaaatatcccactcaagatcatataacattccaggtactcaggatgaatggtttgaggactggtctgaattcttcaaaggtttcagctgtattaacattctccatctaataaactttatcttgtcattgca

SEQ ID NO: 67 - DNA, 1412 bp, Homo sapiens
atttgtccctgcctacctagccaatctgtccctgtttgggacactggactcccgtgagctggaaggaacagatttaatatctaggggctgggtatccccacatcactcatttggggggtcaagggacccgggcaatatagtattctgctcagtgtctggagatcatctacccaggctggggcttctgggacaggcgaggacccacggaccctggaagagctggtccaggggactgaactcccggcatctttacagagcagagcatgatcacattcctgccgctgctgctggggctcagcctgggctgcacaggagcaggtggcttcgtggcccatgtggaaagcacctgtctgttggatgatgctgggactccaaaggatttcacatactgcatctccttcaacaaggatctgctgacctgctgggatccagaggagaataagatggccccttgcgaatttggggtgctgaatagcttggcgaatgtcctctcacagcacctcaaccaaaaagacaccctgatgcagcgcttgcgcaatgggcttcagaattgtgccacacacacccagcccttctggggatcactgaccaacaggacacggccaccatctgtgcaagtagccaaaaccactccttttaacacgagggagcctgtgatgctggcctgctatgtgtggggcttctatccagcagaagtgactatcacgtggaggaagaacgggaagcttgtcatgcctcacagcagtgcgcacaagactgcccagcccaatggagactggacataccagaccctctcccatttagccttaaccccctcttacggggacacttacacctgtgtggtagagcacactggggctcctgagcccatccttcgggactggacacctgggctgtcccccatgcagaccctgaaggtttctgtgtctgcagtgactctgggcctgggcctcatcatcttctctcttggtgtgatcagctggcggagagctggccactctagttacactcctcttcctgggtccaattattcagaaggatggcacatttcctagaggcagaatcctacaacttccactccaagtgagaaggagattcaaactcaatgatgctaccatgcctctccaacatcttcaaccccctgacattatcttggatcctatggtttctccatccaattctttgaatttcccagtctcccctatgtaaaacttagcaacttgggggacctcattcctgggactatgctgtaaccaaattattgtccaaggctatatttctgggatgaatataatctgaggaagggagttaaagaccctcctggggctctcagtgtgccatagaggacagcaactggtgattgtttcagagaaataaactttggtggaaatattgttaaaaaaaaaaaaaaa

SEQ ID NO: 68 - DNA, 7479 bp, Homo sapiens
agaatcttctgtaggcctttctcttgccttcttttattcacaactgatgacactgcatatcttcccctgttcttattgggagaaggccttgtgtgtcaccaagaggttctcagaagggacctgtcagtttttggttaaaagaacccggaaagagaaggactatgggggaactgatggcgttcctgttacctctcatcattgtgttaatggtgaagcacagcgattcccggacgcactctctgagatattttcgcctgggcgtttcggatcccatccatggggtccctgaatttatttcggttgggtacgtggactcgcaccctatcaccacatatgacagtgtcactcggcagaaggagccacgggccccatggatggcagagaacctcgcgcctgatcactgggagaggtacactcagctgctgaggggctggcagcagatgttcaaggtggaactgaagcgcctacagaggcactacaatcactcagggtctcacacttaccagagaatgattggctgtgagctgctggaggatggaagcaccacaggatttctgcagtatgcatatgacgggcaggatttcctgatcttcaataaagacaccctctcctggctggctgtagataatgtggctcacaccatcaagcaggcatgggaggccaatcagcatgagttgctgtatcaaaagaattggctggaagaagaatgtattgcctggctaaagagattcctggagtatgggaaagacaccctacaaagaacagagcaaaatggagccatctaccttccaacaccagatcgatgattgcagatccctcttttccagttctccttcctctaggagccatgttatcctctgtcccccatagagtcaagcctagtgcttgaaggtcctgacgacacccacaacatacatgagagtaatgggattgagcatttatggcagcaacagaggagccacaaaatgttctttgttctttggctccaaaaagactgtcagctttcagtctcttttgatggactgttttatcagagttgactttaaatacagcttgtctcatgacacaacgcttccctacattctatttgtcaatgatgatttgcaactagttggagattctcagagcaggaaggaatcttttcaaccagagcaggaactgtcttctgcaatgccttggacttgagcctccagcctccacttgaacaccatgtgaagggaacctcagtacttcataaaatggcctttctcattcatctttcatgggaacatttattgtacaagcgctttgaatatcatgggcaccatgactgtgaccctacaggtaggattggatcactccatgagagtagccggcaggtttctacaatggcctgggaatggactgattatttttatacattttctggcctgagagaaagccaaagtcccctgctgttcacagcaaccctgcctgggagcttggaatcttggtaatctgcccggttggatctatggaggtagtctcaccctttttgtcttttgtgggaaattaagagaaataattatcagacatatcatcacctccagtggaactacagagacctggacccagctgcactattttaatgtaaaaataacagtatggccaggtgcagtggctcacgcctgtaatcccatcactttgagcagccaaggcgggcggatcacgaggtcaggagattaagaccatcctggccaatatggtgaaaccctgtctctactaaaatacaaaaaattagctgggcatggtgttgcgtgcctgtagtcccagctacttgggaggctgagacaggggaattgcttgaacccgggaggcagagattgcagtgagccgagatcacgccactgcactccagcctggcgacagagtgagactctatctcaaaataataataataataataataataataataataataataacagtatatttggtgtcaggagagggctcaattctcatttctgcctttcctgtgctggctcatggtagctgggcatgacttgccttcctacataggttgtcttcatacatatgcactgggaatcaataaaagcccatggtgagaatgaacatccccttaatgttccttactatccccaacccctgaggcctcacctactgccctgccatgtggagctacttgccctggggctgccagtcacacattcctcggtcctacttctctgaccccgtttgactctgcacctgagccctaatgcttacttcagtgacctgaactttgacaagtggcttttgtcctgcacctcaggtttgacctctgctctcccttgaccttgactgtgacatttgacctttggctttaatcattacagcctcagataaaggtaccttcagcccgggcacagtggctcacgcctgtaatcctagcactttgggaggctgaggcaggcggattccctgagctcaggagttcaagaccagcctgggcaacacggtgaaaccctgtctctactaaaatacaaataattagctgggcatggtggcatgtgcctatagtcccagctacttgggaggctaaggcaggagaatcacttgaatctataaggcagaggtggcagtgagccgagatcacaccactgcactccagcctgggcaacggagcaagactctgtctccaaaaaaaaaaagaaagataccctcagtgtgccaggcctctaagagctcacctgccaggcttcctccttgctccactgtcccatgtaattccatatatgaagctaccactgtacatctctcttttccggtgcctgttgagttgcatagaagcacagttgtgtttattttgtttttagggttgccatgggcaatttccgtgccacttttaagcagtgttgcactgtgaagagaatgtaggcaagtttatttctggaatggtttcttcttacaatcagaatagttaggatgtaatatatttttgggtgggcatttaaagtgaaaaggtacatatttacatagacacaggtgataatgtatctatgtaaatgccttttgattctgcaactgcaggatactctcatcaaagacacagataaaaagcctctgtgtttccaaggccttgccctacacctaacacataatatgtccaaatggatgaagaggaggcaaggacaaggatgtgatgacaaaacattctgttatgcacttgtagcatttatgtttcttcctgggggattttataatactaaaagaatcataatataaagagatgattaaaaaaaaaatactgccgggcacggtggctcatgcctgtaatcccagcattttgggaggccgaggtgggcagatcacctgaggtcgggagttcgagaccagcctgaccaacatggagaaaccctgtctctaccaaacatacaaaattagccggggatggtggcgcatgcctataatcccagctactcgggagtctgaggcagaagaaccgcttgaacccgggaggcagaggttgtggtgagccgagatcgcgccatcgcactctagcctgggcaacaagagtgaaactccatctcaaaaaaataaaaataaaataagtaagtaatacctaaaattctgcaaccttcattttactatagatggttgaagattatattacttcttaattgttttagccttgttattgcttcattacttcatggttgttgagtacagatgctcagtaatcataacctatgaaatatttgacaccatgatctaaacattaaaaacaaataactgtgctattgccacagctatgttttggctttgaattttctttactgaatattttggatcaagaacactagatgagaaacctgttcaactctgttcttttttttttttttaactccactgtatttattacctgtttttgttttttttgtttgtttgtttttgatgtgcatatagaccaagatgtggtaaatttaaatggcagatgtttttgatgtggtacatttaagggagagaaagcagtttaaagagcagggtgaaaaatccaacaagactccatcgagagtttctgagctctcccatcaggggccagtcctcctttcctctctcctcttactcccatgatttccaagttgtgatcctttccttatttctgaggaatgacttggtttctcctcttctttttttggcctgagagaagatgtttttgcacttgtagctatgaggaacagattgtccactagggaggccagctgatcattttctgccagagtcacacagagcagtcacaccttattttgaaaaccactgtctggggtctttgtcctcacatatgcaggtctagtgtccccacaaagtgatcagatggatatataaagtggagtgccaatgtattaatttactgtgagaaacacaattgctaagtgggtcagatatctgtctcagctggtcagtacaccttccagcaggaaaatctacataagaacaactaaatcacaatctgtagagtgcttgatgaccccagaattggtgcaaggggacacattcttgcttgttagcacctgctctctggagtttgctattttctcacacacagtgtattagttcacagaatgttctccaaggaggacagggggctttgcccatagccatgtgctgtgggcagcagagctaggaagaagcacaggcatctcccagcccaggtgtttcccacttaactgcattgcccttttcatcttttttttttccccaatagcttcaggacattcagtacattgtgctttttagaggttgatgattccactgcctgagctgccttcacctctctttctttggaaattgccatctttgagcattgtatgtctctgtaacatctctgcatctccttttcactctggcctccctttctccattgtccttctagcttctggttgccccaaaccccacagactgtgtaacaaaacccaaaacctattggtttaaaacaatacccattttattttctttcatagtttctatgggtcaggaatttggatatggcttgggtaagcagttctggcttctcatggagttggaggcaagtggtggctggaacagaaatggggcagccaggggtggtggccaggcatcagctacatctcctccatgtagtctcaggaactctccatgtaatctctctgtgtgggttgggcttcctcacaacatggtggcctcagggcagtcactgcttacatggcagctagcttccctcagagtgagtatcccaagagatcacagtcaaagtgcatagcatttatataatctaatcttggaagtcacaaaatgtcattcttgtgatactctcattggtgaagaagtcataaaatcctgctcaggttcaaaaagagggtgtatagaacccaacactcaataggaagattgtcagagttacattgtaagaagagcatgtagttgggagatatcattgtggccattttgggaaagatgcaacatgtcacaatgtcatgttctccatcgtctccccgttccaccttgtactggtttccaagggtagtcgtttaaaagtaccacaaaaactgggtggcttggaacaacagaaatttattgtttcacagttctggaggccagaagttcaaaatgaagtgttggcagaaacatgctgcctctaaagggactgggaaaggatctgttccaggcttccctcctatcttctggttgttccttgccttctggctgcgtaactctagtcttcatttggtgttctccctgcatgcatggctttgtgtccaaatttccttttttcatgaggccatcagtcatactggattagggacccactctactactgcaggatgacctcaccttcccaaattacatctgcaacaaccctatttccaaagaaggccacattctgaggtactgggggttataacttcaacatgaattttttggaggaaacaattcaactcctaacacatctctacccaacctctgtaggttccctcaatccaccaaaattttttggctccactggattatctagcagttaggaaaccaagatcattaaatgaattcaccgcaactacagtgagactgactaccttagcttacctctgtgaaaggagttaagccaaaggaatctgtggaattttggagagtttgggagcatttgggggcaggaggcaaatgttcttcctttaaatcacaacacttagttctcttccatttataagactcacccctccatcccaacccctgcaccacaggacaaggaagtgttcttggtcttcaactttcatccctgatggtgaaagcagttgctcctgacctatttgcccaccagcttctcctctggagcctgaggcttctgatgcctgcctggctggttctcagtaagaaggtcaagttcaaccagaggggagatgctgatgcctttcagtacttaaatatgagttcagaccctggggcctggacataagatttggggtcccctggatataagatttctgaaaacactcagactgtggagacccctgctgagggagaagccccaaactgtggcttcaggggaatgcaccaaggctctcattgaggccaccttctccaacaagctcccctcctgcttccccatggctggcatggctgaggaaaaaggacactgagcacagcccgtgcatgagcggcttgccatgcaacaggataaaacccataatgccactcagcaagccttggttgtaaatctagtttgattacatttgtaatcaaatgatggccatttgttctgtttctggtttgtgaaccaactgaagacataagcagggcctcagctaacccacaaatagcacatgtgtgcaaactggaaaaatgaacccttcttctgggaggacgccagcccaggccaggtcacccggcttggccagcagaacacagagtagattttggtcccgtttgttccccagtggggtatctatccttgtgcagggcacaagcctacatggtggctctggtcatatcattagaaaatagacagaaatgggctgcacaccagaatgaatgaattgaattgaaagggaggagtgatggtggaaaaaaaaacaagtcaattcatttagactggtagaaccagaaccactgtgtagtacatccaaacggttaaaattccctggaagatgttacataatcctatcatggtgtttatttatggaaatctattttaaaaattttatgtaatactgcacagtctgtttgcatgatgccttgtacgtagtagcaactcagtaaatactttttgaatgaactagtatagtattttaattagctagtcttcatgtactggtacaaaagaacagtgtcatcttacagctgaagtcatagaggggaaatatcccactcaagatcatataacattccaggtactcaggatgaatggtttgaggactggtctgaattcttcaaaggtttcagctgtattaacattctccatctaataaactttatcttgtcattgca

SEQ ID NO: 69 - DNA, 7860 bp, Homo sapiens
agaatcttctgtaggcctttctcttgccttcttttattcacaactgatgacactgcatatcttcccctgttcttattgggagaaggccttgtgtgtcaccaagaggttctcagaagggacctgtcagtttttggttaaaagaacccggaaagagaaggactatgggggaactgatggcgttcctgttacctctcatcattgtgttaatggtgaagcacagcgattcccggacgcactctctgagatattttcgcctgggcgtttcggatcccatccatggggtccctgaatttatttcggttgggtacgtggactcgcaccctatcaccacatatgacagtgtcactcggcagaaggagccacgggccccatggatggcagagaacctcgcgcctgatcactgggagaggtacactcagctgctgaggggctggcagcagatgttcaaggtggaactgaagcgcctacagaggcactacaatcactcagggtctcacacttaccagagaatgattggctgtgagctgctggaggatggaagcaccacaggatttctgcagtatgcatatgacgggcaggatttcctgatcttcaataaagacaccctctcctggctggctgtagataatgtggctcacaccatcaagcaggcatgggaggccaatcagcatgagttgctgtatcaaaagaattggctggaagaagaatgtattgcctggctaaagagattcctggagtatgggaaagacaccctacaaagaacagagcccccactggtcagagtaaatcgcaaagaaacttttccaggggttacagctctcttctgcaaagctcatggcttttaccccccagaaatttacatgacatggatgaaaaacggggaagaaattgtccaagaaattgattatggagacattcttcccagtggggatggaacctatcaggcgtgggcatcaattgagcttgatcctcagagcagcaacctttactcctgtcatgtggagcactgcggtgtccacatggttcttcaggtcccccaggaatcagaaactatccctcttgtgatgaaagctgtctctgggtccattgtccttgtcattgtgctggctggagttggtgttctagtctggagaagaaggccccgagagcaaaatggagccatctaccttccaacaccagatcgatgattgcagatccctcttttccagttctccttcctctaggagccatgttatcctctgtcccccatagagtcaagcctagtgcttgaaggtcctgacgacacccacaacatacatgagagtaatgggattgagcatttatggcagcaacagaggagccacaaaatgttctttgttctttggctccaaaaagactgtcagctttcagtctcttttgatggactgttttatcagagttgactttaaatacagcttgtctcatgacacaacgcttccctacattctatttgtcaatgatgatttgcaactagttggagattctcagagcaggaaggaatcttttcaaccagagcaggaactgtcttctgcaatgccttggacttgagcctccagcctccacttgaacaccatgtgaagggaacctcagtacttcataaaatggcctttctcattcatctttcatgggaacatttattgtacaagcgctttgaatatcatgggcaccatgactgtgaccctacaggtaggattggatcactccatgagagtagccggcaggtttctacaatggcctgggaatggactgattatttttatacattttctggcctgagagaaagccaaagtcccctgctgttcacagcaaccctgcctgggagcttggaatcttggtaatctgcccggttggatctatggaggtagtctcaccctttttgtcttttgtgggaaattaagagaaataattatcagacatatcatcacctccagtggaactacagagacctggacccagctgcactattttaatgtaaaaataacagtatggccaggtgcagtggctcacgcctgtaatcccatcactttgagcagccaaggcgggcggatcacgaggtcaggagattaagaccatcctggccaatatggtgaaaccctgtctctactaaaatacaaaaaattagctgggcatggtgttgcgtgcctgtagtcccagctacttgggaggctgagacaggggaattgcttgaacccgggaggcagagattgcagtgagccgagatcacgccactgcactccagcctggcgacagagtgagactctatctcaaaataataataataataataataataataataataataataacagtatatttggtgtcaggagagggctcaattctcatttctgcctttcctgtgctggctcatggtagctgggcatgacttgccttcctacataggttgtcttcatacatatgcactgggaatcaataaaagcccatggtgagaatgaacatccccttaatgttccttactatccccaacccctgaggcctcacctactgccctgccatgtggagctacttgccctggggctgccagtcacacattcctcggtcctacttctctgaccccgtttgactctgcacctgagccctaatgcttacttcagtgacctgaactttgacaagtggcttttgtcctgcacctcaggtttgacctctgctctcccttgaccttgactgtgacatttgacctttggctttaatcattacagcctcagataaaggtaccttcagcccgggcacagtggctcacgcctgtaatcctagcactttgggaggctgaggcaggcggattccctgagctcaggagttcaagaccagcctgggcaacacggtgaaaccctgtctctactaaaatacaaataattagctgggcatggtggcatgtgcctatagtcccagctacttgggaggctaaggcaggagaatcacttgaatctataaggcagaggtggcagtgagccgagatcacaccactgcactccagcctgggcaacggagcaagactctgtctccaaaaaaaaaaagaaagataccctcagtgtgccaggcctctaagagctcacctgccaggcttcctccttgctccactgtcccatgtaattccatatatgaagctaccactgtacatctctcttttccggtgcctgttgagttgcatagaagcacagttgtgtttattttgtttttagggttgccatgggcaatttccgtgccacttttaagcagtgttgcactgtgaagagaatgtaggcaagtttatttctggaatggtttcttcttacaatcagaatagttaggatgtaatatatttttgggtgggcatttaaagtgaaaaggtacatatttacatagacacaggtgataatgtatctatgtaaatgccttttgattctgcaactgcaggatactctcatcaaagacacagataaaaagcctctgtgtttccaaggccttgccctacacctaacacataatatgtccaaatggatgaagaggaggcaaggacaaggatgtgatgacaaaacattctgttatgcacttgtagcatttatgtttcttcctgggggattttataatactaaaagaatcataatataaagagatgattaaaaaaaaaatactgccgggcacggtggctcatgcctgtaatcccagcattttgggaggccgaggtgggcagatcacctgaggtcgggagttcgagaccagcctgaccaacatggagaaaccctgtctctaccaaacatacaaaattagccggggatggtggcgcatgcctataatcccagctactcgggagtctgaggcagaagaaccgcttgaacccgggaggcagaggttgtggtgagccgagatcgcgccatcgcactctagcctgggcaacaagagtgaaactccatctcaaaaaaataaaaataaaataagtaagtaatacctaaaattctgcaaccttcattttactatagatggttgaagattatattacttcttaattgttttagccttgttattgcttcattacttcatggttgttgagtacagatgctcagtaatcataacctatgaaatatttgacaccatgatctaaacattaaaaacaaataactgtgctattgccacagctatgttttggctttgaattttctttactgaatattttggatcaagaacactagatgagaaacctgttcaactctgttcttttttttttttttaactccactgtatttattacctgtttttgttttttttgtttgtttgtttttgatgtgcatatagaccaagatgtggtaaatttaaatggcagatgtttttgatgtggtacatttaagggagagaaagcagtttaaagagcagggtgaaaaatccaacaagactccatcgagagtttctgagctctcccatcaggggccagtcctcctttcctctctcctcttactcccatgatttccaagttgtgatcctttccttatttctgaggaatgacttggtttctcctcttctttttttggcctgagagaagatgtttttgcacttgtagctatgaggaacagattgtccactagggaggccagctgatcattttctgccagagtcacacagagcagtcacaccttattttgaaaaccactgtctggggtctttgtcctcacatatgcaggtctagtgtccccacaaagtgatcagatggatatataaagtggagtgccaatgtattaatttactgtgagaaacacaattgctaagtgggtcagatatctgtctcagctggtcagtacaccttccagcaggaaaatctacataagaacaactaaatcacaatctgtagagtgcttgatgaccccagaattggtgcaaggggacacattcttgcttgttagcacctgctctctggagtttgctattttctcacacacagtgtattagttcacagaatgttctccaaggaggacagggggctttgcccatagccatgtgctgtgggcagcagagctaggaagaagcacaggcatctcccagcccaggtgtttcccacttaactgcattgcccttttcatcttttttttttccccaatagcttcaggacattcagtacattgtgctttttagaggttgatgattccactgcctgagctgccttcacctctctttctttggaaattgccatctttgagcattgtatgtctctgtaacatctctgcatctccttttcactctggcctccctttctccattgtccttctagcttctggttgccccaaaccccacagactgtgtaacaaaacccaaaacctattggtttaaaacaatacccattttattttctttcatagtttctatgggtcaggaatttggatatggcttgggtaagcagttctggcttctcatggagttggaggcaagtggtggctggaacagaaatggggcagccaggggtggtggccaggcatcagctacatctcctccatgtagtctcaggaactctccatgtaatctctctgtgtgggttgggcttcctcacaacatggtggcctcagggcagtcactgcttacatggcagctagcttccctcagagtgagtatcccaagagatcacagtcaaagtgcatagcatttatataatctaatcttggaagtcacaaaatgtcattcttgtgatactctcattggtgaagaagtcataaaatcctgctcaggttcaaaaagagggtgtatagaacccaacactcaataggaagattgtcagagttacattgtaagaagagcatgtagttgggagatatcattgtggccattttgggaaagatgcaacatgtcacaatgtcatgttctccatcgtctccccgttccaccttgtactggtttccaagggtagtcgtttaaaagtaccacaaaaactgggtggcttggaacaacagaaatttattgtttcacagttctggaggccagaagttcaaaatgaagtgttggcagaaacatgctgcctctaaagggactgggaaaggatctgttccaggcttccctcctatcttctggttgttccttgccttctggctgcgtaactctagtcttcatttggtgttctccctgcatgcatggctttgtgtccaaatttccttttttcatgaggccatcagtcatactggattagggacccactctactactgcaggatgacctcaccttcccaaattacatctgcaacaaccctatttccaaagaaggccacattctgaggtactgggggttataacttcaacatgaattttttggaggaaacaattcaactcctaacacatctctacccaacctctgtaggttccctcaatccaccaaaattttttggctccactggattatctagcagttaggaaaccaagatcattaaatgaattcaccgcaactacagtgagactgactaccttagcttacctctgtgaaaggagttaagccaaaggaatctgtggaattttggagagtttgggagcatttgggggcaggaggcaaatgttcttcctttaaatcacaacacttagttctcttccatttataagactcacccctccatcccaacccctgcaccacaggacaaggaagtgttcttggtcttcaactttcatccctgatggtgaaagcagttgctcctgacctatttgcccaccagcttctcctctggagcctgaggcttctgatgcctgcctggctggttctcagtaagaaggtcaagttcaaccagaggggagatgctgatgcctttcagtacttaaatatgagttcagaccctggggcctggacataagatttggggtcccctggatataagatttctgaaaacactcagactgtggagacccctgctgagggagaagccccaaactgtggcttcaggggaatgcaccaaggctctcattgaggccaccttctccaacaagctcccctcctgcttccccatggctggcatggctgaggaaaaaggacactgagcacagcccgtgcatgagcggcttgccatgcaacaggataaaacccataatgccactcagcaagccttggttgtaaatctagtttgattacatttgtaatcaaatgatggccatttgttctgtttctggtttgtgaaccaactgaagacataagcagggcctcagctaacccacaaatagcacatgtgtgcaaactggaaaaatgaacccttcttctgggaggacgccagcccaggccaggtcacccggcttggccagcagaacacagagtagattttggtcccgtttgttccccagtggggtatctatccttgtgcagggcacaagcctacatggtggctctggtcatatcattagaaaatagacagaaatgggctgcacaccagaatgaatgaattgaattgaaagggaggagtgatggtggaaaaaaaaacaagtcaattcatttagactggtagaaccagaaccactgtgtagtacatccaaacggttaaaattccctggaagatgttacataatcctatcatggtgtttatttatggaaatctattttaaaaattttatgtaatactgcacagtctgtttgcatgatgccttgtacgtagtagcaactcagtaaatactttttgaatgaactagtatagtattttaattagctagtcttcatgtactggtacaaaagaacagtgtcatcttacagctgaagtcatagaggggaaatatcccactcaagatcatataacattccaggtactcaggatgaatggtttgaggactggtctgaattcttcaaaggtttcagctgtattaacattctccatctaataaactttatcttgtcattgca

SEQ ID NO: 70 - DNA, 1193 bp, Homo sapiens
ggggggccatagttctccctgattgagacttgcctgctgctgtgaccactggtcttgtcctcttctccagcatggtgtgtctgaagctccctggaggctcctgtatggcagcgctgacagtgacattgacggtgctgagctccccactggctttggctggggacacccaaccacgtttcttggagcaggctaagtgtgagtgtcatttcctcaatgggacggagcgagtgtggaacctgatcagatacatctataaccaagaggagtacgcgcgctacaacagtgacctgggggagtaccaggcggtgacggagctggggcggcctgacgctgagtactggaacagccagaaggacctcctggagcggaggcgggccgaggtggacacctactgcagatacaactacggggttgtggagagcttcacagtgcagcggcgagtccaacctaaggtgactgtgtatccttcaaagacccagcccctgcagcaccacaacctcctggtctgctctgtgaatggtttctatccaggcagcattgaagtcaggtggttccggaacggccaggaagagaaggctggggtggtgtccacaggcctgatccagaatggagactggaccttccagaccctggtgatgctggaaacagttcctcggagtggagaggtttacacctgccaagtggagcatccaagcatgatgagccctctcacggtgcaatggagtgcacggtctgaatctgcacagagcaagatgctgagtggagtcgggggctttgtgctgggcctgctcttccttgggacagggctgttcatctacttcaggaatcagaaaggacactctggacttcagccaacaggactcttgagctgaagtgcagatgaccacattcaaggaagaaccttctgccccagctttgcaagatgaaaagctttcccacttggctcttattcttccacaagagctttgtcaggaccaggttgttactggttcagcaactctgcagaaaatgtcctcccttgtggcttccttagctcctgttcttggcctgaagcctcacagctttgatggcagtgcctcatcttcaacttttgtgcttccctttacctaaactgtcctgcctcccgtgcatctgtactccccttgtgccacacattgcattattaaatgtttctcaaacatggagttaaaaaa

SEQ ID NO: 71 - DNA, 1542 bp, Homo sapiens
acaattactctacagctcagaacaccaactgctgaggctgccttgggaagaggatgatcctaaacaaagctctgctgctgggggccctcgctctgaccaccgtgatgagcccctgtggaggtgaagacattgtggctgaccacgttgcctcttgtggtgtaaacttgtaccagttttacggtccctctggccagtacacccatgaatttgatggagatgagcagttctacgtggacctggagaggaaggagactgcctggcggtggcctgagttcagcaaatttggaggttttgacccgcagggtgcactgagaaacatggctgtggcaaaacacaacttgaacatcatgattaaacgctacaactctaccgctgctaccaatgaggttcctgaggtcacagtgttttccaagtctcccgtgacactgggtcagcccaacaccctcatttgtcttgtggacaacatctttcctcctgtggtcaacatcacatggctgagcaatgggcagtcagtcacagaaggtgtttctgagaccagcttcctctccaagagtgatcattccttcttcaagatcagttacctcaccttcctcccttctgctgatgagatttatgactgcaaggtggagcactggggcctggaccagcctcttctgaaacactgggagcctgagattccagcccctatgtcagagctcacagagactgtggtctgtgccctggggttgtctgtgggcctcatgggcattgtggtgggcactgtcttcatcatccaaggcctgcgttcagttggtgcttccagacaccaagggccattgtgaatcccatcctggaagggaaggtgcatcgccatctacaggagcagaagaatggacttgctaaatgacctagcactattctctggcccgatttatcatatcccttttctcctccaaatatttctcctctcaccttttctctgggacttaagctgctatatcccctcagagctcacaaatgcctttacattctttccctgacctcctgattttttttttcttttctcaaatgttacctacaaagacatgcctggggtaagccacccggctacctaattcctcagtaacctccatctaaaatctccaaggaagcaataaattccttttatgagatctatgtcaaatttttccatctttcatccagggctgactgaaactatggctaataattggggtactcttatgtttcaatccaatttaacctcatttcccagatcatttttcatgtccagtaacacagaagccaccaagtacagtatagcctgataatatgttgatttcttagctgacattaatatttcttgcttccttgtgttcccacccttggcactgccacccacccctcaattcaggcaacaatgaaattaatggataccgtctgcccttggcccagaattgttatagcaaaaattttagaaccaaaaaataagtctgtactaatttcaatgtggcttttaaaagtatgacagagaaataagttaggataaaggaaatttgaatctca

SEQ ID NO: 72 - DNA, 1656 bp, Homo sapiens
tttttattctttctgccaggtacatcagatccatcaggtccgagctgtgttgactaccactgcttttcccttcgtctcagttatgtcttggaagaaggctttgcggatccccggagaccttcgggtagcaactgtcaccttgatgctggcgatgctgagctccctactggctgagggcagagactctcccgaggatttcgtgttccagtttaagggcatgtgctacttcaccaacgggacggagcgcgtgcgtcttgtgaccagatacatctataaccgagaggagtacgcgcgcttcgacagcgacgtgggggtgtaccgcgcggtgacgccgcaggggcggcctgatgccgagtactggaacagccagaaggaagtcctggaggggacccgggcggagttggacacggtgtgcagacacaactacgaggtggcgttccgcgggatcttgcagaggagagtggagcccacagtgaccatctccccatccaggacagaggccctcaaccaccacaacctgctggtctgctcggtgacagatttctatccaggccagatcaaagtccggtggtttcggaatgatcaggaggagacagccggcgttgtgtccaccccccttattaggaatggtgactggactttccagatcctggtgatgctggaaatgactccccagcgtggagatgtctacacctgccacgtggagcaccccagcctccagagccccatcaccgtggagtggcgggctcagtctgaatctgcccagagcaagatgctgagtggcgttggaggcttcgtgctggggctgatcttccttgggctgggccttatcatccgtcaaaggagtcagaaagggcttctgcactgactcctgagactattttaactaggattggttatcactcttctgtgatgcctgcttatgcctgcccagaattcccagctgcctgtgtcagcttgtccccctgagatcaaagtcctacagtggctgtcacgcagccaccaggtcatctcctttcatccccaccccaaggcgctggctgtgactctgcttcctgcactgacccagagcctctgcctgtgcatggccagctgcgtctactcaggtcccaaggggtttctgtttctattctttcctcagactgctcaagagaagcacatgaaaaacattacctgactttagagcttttttacataattaaacatgatcctgagttatctgtattctgaactttcttaattgagaagaggcaggaaatcactgcagaatgaaggaacatcccttgaggtgacccagcaaacctgtggccagaaggaggattgtaccttgaaaagacactgaaagcattttggggtgtgaagtaagggtgggcagaggaggtagaaaataattcaattgtcgcatcattcatggttctttaatactgatgctcagtgcattggccttagaatatcccagcctctcttctggtttggtgagtgctgtgtaaataagcatggtagaattgtttggagacatatatagtgatccttggtcactggtgtttcaaacattctggaaagtcacatcgatcaagaatattttttatttttaagaaagcataaccagcaataaaaatactatttttgagtctaaatgaaaaaaaaaaaaaaaaa

SEQ ID NO: 73 - DNA, 1664 bp, Homo sapiens
tttttattctttctgccaggtacatcagatccatcaggtccgagctgtgttgactaccactgcttttcccttcgtctcagttatgtcttggaagaaggctttgcggatccccggagaccttcgggtagcaactgtcaccttgatgctggcgatgctgagctccctactggctgagggcagagactctcccgaggatttcgtgttccagtttaagggcatgtgctacttcaccaacgggacggagcgcgtgcgtcttgtgaccagatacatctataaccgagaggagtacgcgcgcttcgacagcgacgtgggggtgtaccgcgcggtgacgccgcaggggcggcctgatgccgagtactggaacagccagaaggaagtcctggaggggacccgggcggagttggacacggtgtgcagacacaactacgaggtggcgttccgcgggatcttgcagaggagagtggagcccacagtgaccatctccccatccaggacagaggccctcaaccaccacaacctgctggtctgctcggtgacagatttctatccaggccagatcaaagtccggtggtttcggaatgatcaggaggagacagccggcgttgtgtccaccccccttattaggaatggtgactggactttccagatcctggtgatgctggaaatgactccccagcgtggagatgtctacacctgccacgtggagcaccccagcctccagagccccatcaccgtggagtggcgggctcagtctgaatctgcccagagcaagatgctgagtggcgttggaggcttcgtgctggggctgatcttccttgggctgggccttatcatccgtcaaaggagtcagaaaggacctcaagggcctccaccagcagggcttctgcactgactcctgagactattttaactaggattggttatcactcttctgtgatgcctgcttatgcctgcccagaattcccagctgcctgtgtcagcttgtccccctgagatcaaagtcctacagtggctgtcacgcagccaccaggtcatctcctttcatccccaccccaaggcgctggctgtgactctgcttcctgcactgacccagagcctctgcctgtgcatggccagctgcgtctactcaggtcccaaggggtttctgtttctattctttcctcagactgctcaagagaagcacatgaaaaacattacctgactttagagcttttttacataattaaacatgatcctgagttatctgtattctgaactttcttaattgagaagaggcaggaaatcactgcagaatgaaggaacatcccttgaggtgacccagcaaacctgtggccagaaggaggattgtaccttgaaaagacactgaaagcattttggggtgtgaagtaagggtgggcagaggaggtagaaaataattcaattgtcgcatcattcatggttctttaatactgatgctcagtgcattggccttagaatatcccagcctctcttctggtttggtgagtgctgtgtaaataagcatggtagaattgtttggagacatatatagtgatccttggtcactggtgtttcaaacattctggaaagtcacatcgatcaagaatattttttatttttaagaaagcataaccagcaataaaaatactatttttgagtctaaatga

SEQ ID NO: 74 - DNA, 1638 bp, Homo sapiens
tttttattctttctgccaggtacatcagatccatcaggtccgagctgtgttgactaccacttttcccttcgtctcaattatgtcttggaaaaaggctttgcggatccccggaggccttcgggcagcaactgtgaccttgatgctgtcgatgctgagcaccccagtggctgagggcagagactctcccgaggatttcgtgtaccagtttaagggcatgtgctacttcaccaacgggacagagcgcgtgcgtcttgtgagcagaagcatctataaccgagaagagatcgtgcgcttcgacagcgacgtgggggagttccgggcggtgacgctgctggggctgcctgccgccgagtactggaacagccagaaggacatcctggagaggaaacgggcggcggtggacagggtgtgcagacacaactaccagttggagctccgcacgaccttgcagcggcgagtggagcccacagtgaccatctccccatccaggacagaggccctcaaccaccacaacctgctggtctgctcggtgacagatttctatccagcccagatcaaagtccggtggtttcggaatgaccaggaggagacagctggcgttgtgtccaccccccttattaggaatggtgactggaccttccagatcctggtgatgctggaaatgactccccagcgtggagacgtctacacctgccacgtggagcaccccagcctccagagccccatcaccgtggagtggcgggctcaatctgaatctgcccagagcaagatgctgagtggcattggaggcttcgtgctggggctgatcttcctcgggctgggccttatcatccatcacaggagtcagaaagggctcctgcactgactcctgagactattttaactgggattggttatcacttttctgtaacgcctgcttgtccctgcccagaattcccagctgtctgtgtcagcctgtccccctgagatcagagtcctacagtggctgtcacgcagccaccaggtcatctcctttcatccccaccttgaggcggatggctgtgaccctacttcctgcactgacccacagcctctgcctgtgcacggccagctgcatctactcaggccccaaggggtttctgtttctattctctcctcagactgctcaagagaagcacatgaaaaccattacctgactttagagcttttttacataattaaacatgatcctgagttatctgtattctgaacttccttaattgagcagaggcaggaaatcactgcagaatgaaggaacataccttgaggtgacccagccaacctgtgcccagaaggagggttgtaccttgaaaagacactgaaagaatttggggtgcaaagtcatggtgggcagaggaggtagaaaatcaactcagttgttgcatcattcatggttctttcatattgatgttcagtgcagtggcctgagaatatcccagcctctcttctggtttggtgagtgctatataagtaaacatggtggaattgtttgggggcagatatagtgacccttggtcactggtgtttcaaacattctggcaagtcacatcaatcaagaataatttttacttttaagaaagcataaccagcaataaaagtattatttttgattctaaatga

SEQ ID NO: 75 - DNA, 1388 bp, Homo sapiens
gatttatactcttaatgggtactttctgactgaattttatgagctcattctgaagaggctgacgattttactatctcatttttttcctttctccagaatgggttctgggtgggtcccctgggtggtggctctgctagtgaatctgacccgactggattcctccatgactcaaggcacagactctccagaagattttgtgattcaggcaaaggctgactgttacttcaccaacgggacagaaaaggtgcagtttgtggtcagattcatctttaacttggaggagtatgtacgtttcgacagtgatgtggggatgtttgtggcattgaccaagctggggcagccagatgctgagcagtggaacagccggctggatctcttggagaggagcagacaggccgtggatggggtctgtagacacaactacaggctgggcgcacccttcactgtggggagaaaagtgcaaccagaggtgacagtgtacccagagaggaccccactcctgcaccagcataatctgctgcactgctctgtgacaggcttctatccaggggatatcaagatcaagtggttcctgaatgggcaggaggagagagctggggtcatgtccactggccctatcaggaatggagactggacctttcagactgtggtgatgctagaaatgactcctgaacttggacatgtctacacctgccttgtcgatcactccagcctgctgagccctgtttctgtggagtggagagctcagtctgaatattcttggagaaagatgctgagtggcattgcagccttcctacttgggctaatcttccttctggtgggaatcgtcatccagctaagggctcagaaaggatatgtgaggacgcagatgtctggtaatgaggtctcaagagctgttctgctccctcagtcatgctaaggtcctcactgaagcttctctctctggagcctgaagtagtgatgagtagtctgggccctgggtgaggtaaaggacattcatgaggtcaatgttctgggaataactctcttccctgatccttggaggagcccgaactgattctggagctctgtgttctgagatcatgcatctcccacccatctgcccttctcccttctacgtgtacatcattaatccccattgccaagggcattgtccagaaactcccctgagaccttactccttccagccccaaatcatttacttttctgtggtccagccctactcctataagtcatgatctccaaagctttctgtcttccaactgcagtctccacagtcttcagaagacaaatgctcaggtagtcactgtttccttttcactgtttttaaaaaccttttattgtcaaataaaatggagatacaaaaaatgtaaaaaaaaaaaaaaaaa

SEQ ID NO: 76 - DNA, 1697 bp, Homo sapiens
atttccagtgctagaggcccacagtttcagtctcatctgcctccactcggcctcagttcctcatcactgttcctgtgctcacagtcatcaattatagaccccacaacatgcgccctgaagacagaatgttccatatcagagctgtgatcttgagagccctctccttggctttcctgctgagtctccgaggagctggggccatcaaggcggaccatgtgtcaacttatgccgcgtttgtacagacgcatagaccaacaggggagtttatgtttgaatttgatgaagatgagatgttctatgtggatctggacaagaaggagaccgtctggcatctggaggagtttggccaagccttttcctttgaggctcagggcgggctggctaacattgctatattgaacaacaacttgaataccttgatccagcgttccaaccacactcaggccaccaacgatccccctgaggtgaccgtgtttcccaaggagcctgtggagctgggccagcccaacaccctcatctgccacattgacaagttcttcccaccagtgctcaacgtcacgtggctgtgcaacggggagctggtcactgagggtgtcgctgagagcctcttcctgcccagaacagattacagcttccacaagttccattacctgacctttgtgccctcagcagaggacttctatgactgcagggtggagcactggggcttggaccagccgctcctcaagcactgggaggcccaagagccaatccagatgcctgagacaacggagactgtgctctgtgccctgggcctggtgctgggcctagtcggcatcatcgtgggcaccgtcctcatcataaagtctctgcgttctggccatgacccccgggcccaggggaccctgtgaaatactgtaaaggtgacaaaatatctgaacagaagaggacttaggagagatctgaactccagctgccctacaaactccatctcagcttttcttctcacttcatgtgaaaactactccagtggctgactgaattgctgacccttcaagctctgtccttatccattacctcaaagcagtcattccttagtaaagtttccaacaaatagaaattaatgacactttggtagcactaatatggagattatcctttcattgagccttttatcctctgttctcctttgaagaacccctcactgtcaccttcccgagaataccctaagaccaataaatacttcagtatttcagagcggggagactctgagtcattcttactggaagtctaggaccaggtcacatgtgaatactatttcttgaaggtgtggtttcaacctctgttgccgatgtggttactaaaggttctgatcccacttgaacggaaaggtctgaggatattgattcagtcctgggtttttccctaactacaggatagggtggggtagagaaaggatatttgggggaaattttacttggatgaagattttcttggatgtagtttgaagactgcagtgtttgaagtctctgagggaagagatttggtctgtctggatcaagatttcaggcagattaggattccattcacagcccctgagcttccttcccaaggctgtattgtaattatagcaatatttcatggaggatttttctacatgataaactaagagccaagaaataaaatttttaaaatgccctaaaaaaaaaaaaaaaaaa

SEQ ID NO: 77 - DNA, 1122 bp, Homo sapiens
gatctaaggccaccctctcggggagggagttggggaagctgggttggctgggttggtagctcctacctactgtgtggcaagaaggtatgggtcatgaacagaaccaaggagctgcgctgctacagatgttaccacttctgtggctgctaccccactcctgggccgtccctgaagctcctactccaatgtggccagatgacctgcaaaaccacacattcctgcacacagtgtactgccaggatgggagtcccagtgtgggactctctgaggcctacgacgaggaccagcttttcttcttcgacttttcccagaacactcgggtgcctcgcctgcccgaatttgctgactgggctcaggaacagggagatgctcctgccattttatttgacaaagagttctgcgagtggatgatccagcaaatagggccaaaacttgatgggaaaatcccggtgtccagagggtttcctatcgctgaagtgttcacgctgaagcccctggagtttggcaagcccaacactttggtctgttttgtcagtaatctcttcccacccatgctgacagtgaactggcagcatcattccgtccctgtggaaggatttgggcctacttttgtctcagctgtcgatggactcagcttccaggccttttcttacttaaacttcacaccagaaccttctgacattttctcctgcattgtgactcacgaaattgaccgctacacagcaattgcctattgggtaccccggaacgcactgccctcagatctgctggagaatgtgctgtgtggcgtggcctttggcctgggtgtgctgggcatcatcgtgggcattgttctcatcatctacttccggaagccttgctcaggtgactgattcttccagaccagagtttgatgccagcagcttcggccatccaaacagaggatgctcagatttctcacatcctgcccaggatctcctcttagggtagaagtctctgggacatccctggggtgtgtgtgtagatttcccacctggggactctgctgtccctgggcttgcatcccagggatcccagagtggcctgcctatcacaaccacatcccttccccccacaaggcaataaatctcatttctttatatc

SEQ ID NO: 78 - DNA, 1301 bp, Homo sapiens
tttctcactcccattgggcgtcgcgtttctagagaagccaatcagtgtcgccgcagttcccaggttctaaagtcccacgcaccccgcgggactcatatttttcccagacgcggaggttggggtcatggcgccccgaagcctcctcctgctgctctcaggggccctggccctgaccgatacttgggcgggctcccactccttgaggtatttcagcaccgctgtgtcgcggcccggccgcggggagccccgctacatcgccgtggagtacgtagacgacacgcaattcctgcggttcgacagcgacgccgcgattccgaggatggagccgcgggagccgtgggtggagcaagaggggccgcagtattgggagtggaccacagggtacgccaaggccaacgcacagactgaccgagtggccctgaggaacctgctccgccgctacaaccagagcgaggctgggtctcacaccctccagggaatgaatggctgcgacatggggcccgacggacgcctcctccgcgggtatcaccagcacgcgtacgacggcaaggattacatctccctgaacgaggacctgcgctcctggaccgcggcggacaccgtggctcagatcacccagcgcttctatgaggcagaggaatatgcagaggagttcaggacctacctggagggcgagtgcctggagttgctccgcagatacttggagaatgggaaggagacgctacagcgcgcagatcctccaaaggcacacgttgcccaccaccccatctctgaccatgaggccaccctgaggtgctgggccctgggcttctaccctgcggagatcacgctgacctggcagcgggatggggaggaacagacccaggacacagagcttgtggagaccaggcctgcaggggatggaaccttccagaagtgggccgctgtggtggtgcctcctggagaggaacagagatacacatgccatgtgcagcacgaggggctgccccagcccctcatcctgagatgggagcagtctccccagcccaccatccccatcgtgggcatcgttgctggccttgttgtccttggagctgtggtcactggagctgtggtcgctgctgtgatgtggaggaagaagagctcagatagaaacagagggagctactctcaggctgcagtgtgagacagcttccttgtgtgggactgagaagcaagatatcaatgtagcagaattgcacttgtgcctcacgaacatacataaattttaaaaataaagaataaaaatatatctttttatagataaaaaaaaaaaaaaaaaa

SEQ ID NO: 79 - DNA, 1591 bp, Homo sapiens
tttctcactcccattgggcgtcgcgtttctagagaagccaatcagtgtcgccgcagttcccaggttctaaagtcccacgcaccccgcgggactcatatttttcccagacgcggaggttggggtcatggcgccccgaagcctcctcctgctgctctcaggggccctggccctgaccgatacttgggcgggctcccactccttgaggtatttcagcaccgctgtgtcgcggcccggccgcggggagccccgctacatcgccgtggagtacgtagacgacacgcaattcctgcggttcgacagcgacgccgcgattccgaggatggagccgcgggagccgtgggtggagcaagaggggccgcagtattgggagtggaccacagggtacgccaaggccaacgcacagactgaccgagtggccctgaggaacctgctccgccgctacaaccagagcgaggctgggtctcacaccctccagggaatgaatggctgcgacatggggcccgacggacgcctcctccgcgggtatcaccagcacgcgtacgacggcaaggattacatctccctgaacgaggacctgcgctcctggaccgcggcggacaccgtggctcagatcacccagcgcttctatgaggcagaggaatatgcagaggagttcaggacctacctggagggcgagtgcctggagttgctccgcagatacttggagaatgggaaggagacgctacagcgcgcagatcctccaaaggcacacgttgcccaccaccccatctctgaccatgaggccaccctgaggtgctgggccctgggcttctaccctgcggagatcacgctgacctggcagcgggatggggaggaacagacccaggacacagagcttgtggagaccaggcctgcaggggatggaaccttccagaagtgggccgctgtggtggtgcctcctggagaggaacagagatacacatgccatgtgcagcacgaggggctgccccagcccctcatcctgagatgggagcagtctccccagcccaccatccccatcgtgggcatcgttgctggccttgttgtccttggagctgtggtcactggagctgtggtcgctgctgtgatgtggaggaagaagagctcagatagaaacagagggagctactctcaggctgcagcctactcagtggtcagcggaaacttgatgataacatggtggtcaagcttatttctcctgggggtgctcttccaaggatatttgggctgcctccggagtcacagtgtcttgggccgccggaaggtgggtgacatgtggatcttgttttttttgtggctgtggacatctttcaacactgccttcttggccttgcaaagccttcgctttggcttcggctttaggaggggcaggagcttccttcttcgttcttggcaccatcttatgaaaagggtccagattaagatttttgactgagtcattctaaagtaagttgcaagacccatgatactagaccactaaatacttcatcacacacctcctaagaataagaaccaacattatcacaccaaagaaaataaataattccataatattaaaaaaaaaaaaaaaaaa

SEQ ID NO: 80 - DNA, 1025 bp, Homo sapiens
tttctcactcccattgggcgtcgcgtttctagagaagccaatcagtgtcgccgcagttcccaggttctaaagtcccacgcaccccgcgggactcatatttttcccagacgcggaggttggggtcatggcgccccgaagcctcctcctgctgctctcaggggccctggccctgaccgatacttgggcgggctcccactccttgaggtatttcagcaccgctgtgtcgcggcccggccgcggggagccccgctacatcgccgtggagtacgtagacgacacgcaattcctgcggttcgacagcgacgccgcgattccgaggatggagccgcgggagccgtgggtggagcaagaggggccgcagtattgggagtggaccacagggtacgccaaggccaacgcacagactgaccgagtggccctgaggaacctgctccgccgctacaaccagagcgaggctgggtctcacaccctccagggaatgaatggctgcgacatggggcccgacggacgcctcctccgcgggtatcaccagcacgcgtacgacggcaaggattacatctccctgaacgaggacctgcgctcctggaccgcggcggacaccgtggctcagatcacccagcgcttctatgaggcagaggaatatgcagaggagttcaggacctacctggagggcgagtgcctggagttgctccgcagatacttggagaatgggaaggagacgctacagcgcgcagagcagtctccccagcccaccatccccatcgtgggcatcgttgctggccttgttgtccttggagctgtggtcactggagctgtggtcgctgctgtgatgtggaggaagaagagctcagatagaaacagagggagctactctcaggctgcagtgtgagacagcttccttgtgtgggactgagaagcaagatatcaatgtagcagaattgcacttgtgcctcacgaacatacataaattttaaaaataaagaataaaaatatatctttttatagataaaaaaaaaaaaaaaaaa

SEQ ID NO: 81 - DNA, 1578 bp, Homo sapiens
agtgtggtactttgtcttgaggagatgtcctggactcacacggaaacttagggctacggaatgaagttctcactcccattaggtgacaggtttttagagaagccaatcagcgtcgccgcggtcctggttctaaagtcctcgctcacccacccggactcattctccccagacgccaaggatggtggtcatggcgccccgaaccctcttcctgctgctctcgggggccctgaccctgaccgagacctgggcgggctcccactccatgaggtatttcagcgccgccgtgtcccggcccggccgcggggagccccgcttcatcgccatgggctacgtggacgacacgcagttcgtgcggttcgacagcgactcggcgtgtccgaggatggagccgcgggcgccgtgggtggagcaggaggggccggagtattgggaagaggagacacggaacaccaaggcccacgcacagactgacagaatgaacctgcagaccctgcgcggctactacaaccagagcgaggccagttctcacaccctccagtggatgattggctgcgacctggggtccgacggacgcctcctccgcgggtatgaacagtatgcctacgatggcaaggattacctcgccctgaacgaggacctgcgctcctggaccgcagcggacactgcggctcagatctccaagcgcaagtgtgaggcggccaatgtggctgaacaaaggagagcctacctggagggcacgtgcgtggagtggctccacagatacctggagaacgggaaggagatgctgcagcgcgcggacccccccaagacacacgtgacccaccaccctgtctttgactatgaggccaccctgaggtgctgggccctgggcttctaccctgcggagatcatactgacctggcagcgggatggggaggaccagacccaggacgtggagctcgtggagaccaggcctgcaggggatggaaccttccagaagtgggcagctgtggtggtgccttctggagaggagcagagatacacgtgccatgtgcagcatgaggggctgccggagcccctcatgctgagatggaagcagtcttccctgcccaccatccccatcatgggtatcgttgctggcctggttgtccttgcagctgtagtcactggagctgcggtcgctgctgtgctgtggagaaagaagagctcagattgaaaaggagggagctactctcaggctgcaatgtgaaacagctgccctgtgtgggactgagtggcaagtccctttgtgacttcaagaaccctgactcctctttgtgcagagaccagcccacccctgtgcccaccatgaccctcttcctcatgctgaactgcattccttccccaatcacctttcctgttccagaaaaggggctgggatgtctccgtctctgtctcaaatttgtggtccactgagctataacttacttctgtattaaaattagaatctgagtataaatttactttttcaaattatttccaagagagattgatgggttaattaaaggagaagattcctgaaatttgagagacaaaataaatggaagacatgagaacttt

SEQ ID NO: 82 - DNA, 914 bp, Homo sapiens
gcatggggaggggcggccctcaaacgggtcattgccattaatagagacctcaaacaccgcctgctaaaaatacccgactggaggagcataaaagcgcagccgagcccagcgccccgcacttttctgagcagacgtccagagcagagtcagccagcatgaccgagcgccgcgtccccttctcgctcctgcggggccccagctgggaccccttccgcgactggtacccgcatagccgcctcttcgaccaggccttcgggctgccccggctgccggaggagtggtcgcagtggttaggcggcagcagctggccaggctacgtgcgccccctgccccccgccgccatcgagagccccgcagtggccgcgcccgcctacagccgcgcgctcagccggcaactcagcagcggggtctcggagatccggcacactgcggaccgctggcgcgtgtccctggatgtcaaccacttcgccccggacgagctgacggtcaagaccaaggatggcgtggtggagatcaccggcaagcacgaggagcggcaggacgagcatggctacatctcccggtgcttcacgcggaaatacacgctgccccccggtgtggaccccacccaagtttcctcctccctgtcccctgagggcacactgaccgtggaggcccccatgcccaagctagccacgcagtccaacgagatcaccatcccagtcaccttcgagtcgcgggcccagcttgggggcccagaagctgcaaaatccgatgagactgccgccaagtaaagccttagcccggatgcccacccctgctgccgccactggctgtgcctcccccgccacctgtgtgttcttttgatacatttatcttctgtttttctcaaataaagttcaaagcaaccacctgtcaaaaaaaaaaaaaaaaaa

SEQ ID NO: 83 - DNA, 3366 bp, Homo sapiens
gcatgcgtaggcgcgcggccgcggcggcggctggggagggttcttccggaaggttcgggaggcttctggaaaaagcgccgcgcgctgggcgggcccgtcgctatataaggcaggcgcgggggtggcgcgtcagttgcttcagcgtcccggtgtggctgtgccgttggtcctgtgcggtcacttagccaagatgcctgaggaaacccagacccaagaccaaccgatggaggaggaggaggttgagacgttcgcctttcaggcagaaattgcccagttgatgtcattgatcatcaatactttctactcgaacaaagagatctttctgagagagctcatttcaaattcatcagatgcattggacaaaatccggtatgaaagcttgacagatcccagtaaattagactctgggaaagagctgcatattaaccttataccgaacaaacaagatcgaactctcactattgtggatactggaattggaatgaccaaggctgacttgatcaataaccttggtactatcgccaagtctgggaccaaagcgttcatggaagctttgcaggctggtgcagatatctctatgattggccagttcggtgttggtttttattctgcttatttggttgctgagaaagtaactgtgatcaccaaacataacgatgatgagcagtacgcttgggagtcctcagcagggggatcattcacagtgaggacagacacaggtgaacctatgggtcgtggaacaaaagttatcctacacctgaaagaagaccaaactgagtacttggaggaacgaagaataaaggagattgtgaagaaacattctcagtttattggatatcccattactctttttgtggagaaggaacgtgataaagaagtaagcgatgatgaggctgaagaaaaggaagacaaagaagaagaaaaagaaaaagaagagaaagagtcggaagacaaacctgaaattgaagatgttggttctgatgaggaagaagaaaagaaggatggtgacaagaagaagaagaagaagattaaggaaaagtacatcgatcaagaagagctcaacaaaacaaagcccatctggaccagaaatcccgacgatattactaatgaggagtacggagaattctataagagcttgaccaatgactgggaagatcacttggcagtgaagcatttttcagttgaaggacagttggaattcagagcccttctatttgtcccacgacgtgctccttttgatctgtttgaaaacagaaagaaaaagaacaacatcaaattgtatgtacgcagagttttcatcatggataactgtgaggagctaatccctgaatatctgaacttcattagaggggtggtagactcggaggatctccctctaaacatatcccgtgagatgttgcaacaaagcaaaattttgaaagttatcaggaagaatttggtcaaaaaatgcttagaactctttactgaactggcggaagataaagagaactacaagaaattctatgagcagttctctaaaaacataaagcttggaatacacgaagactctcaaaatcggaagaagctttcagagctgttaaggtactacacatctgcctctggtgatgagatggtttctctcaaggactactgcaccagaatgaaggagaaccagaaacatatctattatatcacaggtgagaccaaggaccaggtagctaactcagcctttgtggaacgtcttcggaaacatggcttagaagtgatctatatgattgagcccattgatgagtactgtgtccaacagctgaaggaatttgaggggaagactttagtgtcagtcaccaaagaaggcctggaacttccagaggatgaagaagagaaaaagaagcaggaagagaaaaaaacaaagtttgagaacctctgcaaaatcatgaaagacatattggagaaaaaagttgaaaaggtggttgtgtcaaaccgattggtgacatctccatgctgtattgtcacaagcacatatggctggacagcaaacatggagagaatcatgaaagctcaagccctaagagacaactcaacaatgggttacatggcagcaaagaaacacctggagataaaccctgaccattccattattgagaccttaaggcaaaaggcagaggctgataagaacgacaagtctgtgaaggatctggtcatcttgctttatgaaactgcgctcctgtcttctggcttcagtctggaagatccccagacacatgctaacaggatctacaggatgatcaaacttggtctgggtattgatgaagatgaccctactgctgatgataccagtgctgctgtaactgaagaaatgccaccccttgaaggagatgacgacacatcacgcatggaagaagtagactaatctctggctgagggatgacttacctgttcagtactctacaattcctctgataatatattttcaaggatgtttttctttatttttgttaatattaaaaagtctgtatggcatgacaactactttaaggggaagataagatttctgtctactaagtgatgctgtgataccttaggcactaaagcagagctagtaatgctttttgagtttcatgttggtttattttcacagattggggtaacgtgcactgtaagacgtatgtaacatgatgttaactttgtggtctaaagtgtttagctgtcaagccggatgcctaagtagaccaaatcttgttattgaagtgttctgagctgtatcttgatgtttagaaaagtattcgttacatcttgtaggatctactttttgaacttttcattccctgtagttgacaattctgcatgtactagtcctctagaaataggttaaactgaagcaacttgatggaaggatctctccacagggcttgttttccaaagaaaagtattgtttggaggagcaaagttaaaagcctacctaagcatatcgtaaagctgttcaaaaataactcagacccagtcttgtggatggaaatgtagtgctcgagtcacattctgcttaaagttgtaacaaatacagatgagttaaaagatattgtgtgacagtgtcttatttagggggaaaggggagtatctggatgacagttagtgccaaaatgtaaaacatgaggcgctagcaggagatggttaaacactagctgctccaagggttgacatggtcttcccagcatgtactcagcaggtgtggggtggagcacacgtaggcacagaaaacaggaatgcagacaacatgcatcccctgcgtccatgagttacatgtgttctcttagtgtccacgttgttttgatgttattcatggaataccttctgtgttaaatacagtcacttaattccttggccttaaaa

SEQ ID NO: 84 - DNA, 1480 bp, Homo sapiens
actgcaacgcggaggagcaggatggagatccctgtgcctgtgcagccgtcttggctgcgccgcgcctcggccccgttgcccggactttcggcgcccggacgcctctttgaccagcgcttcggcgaggggctgctggaggccgagctggctgcgctctgccccaccacgctcgccccctactacctgcgcgcacccagcgtggcgctgcccgtcgcccaggtgccgacggaccccggccacttttcggtgctgctagacgtgaagcacttctcgccggaggaaattgctgtcaaggtggtgggcgaacacgtggaggtgcacgcgcgccacgaggagcgcccggatgagcacggattcgtcgcgcgcgagttccaccgtcgctaccgcctgccgcctggcgtggatccggctgccgtgacgtccgcgctgtcccccgagggcgtcctgtccatccaggccgcaccagcgtcggcccaggccccaccgccagccgcagccaagtaggagggggctgggccgcgcccgcaccccgggagcctcctcaggctccctctattaaagccgatctgactccgcccagccagatgtcccgagtgcgccaaggactgtcctctcacccactcctggattctgccctgacctccatcctggacactgccttgataacatagacccttccactgacaccctcgctctcacaccccctccagctttccgaccccacaccgacaactccccggcttccagaccctaccagcactaccctaaccctcagccgacagtctcagccccaccgacccactttcttggcatatagccccacttaagacccctcctctacttccttctgagtcctctacaaagacatccgggtactacatttccatcccttccctattttgacaccaaattatggtgtagacagccctcccccaaccccaggccagtcaggcacaatccccccaccccccaaacgtcctggactgcacagacctcccactccagaccatccaggcctggttcccaagacccgatccttcccctgcaaccagacagtctacaactgccccctccagcccattttctgccgtgaaaccccagccagccacaccagactctggaaccctttttcgactgccccaactcttggacaccaggccaactagaacacccaacaccaaactgtacagactctcccaccccaacctccccagactctgcacggatgtcctaggccccctccccaactctaaccagaccccatccccctaagtccctttgtcttgacccccaagtcttcaaccagatatcctcggcaacccacctcccaccctcctcctcttctccttcaagacccaactgagcacccgctctgattccccacagcctttctccctgccaccactcccttagtctttcccaggcttactctcccaataaatgtgctagagctctgccaaaaaaaaaaaaaaaaaaaaaa

SEQ ID NO: 85 - DNA, 3887 bp, Homo sapiens
gactgcgcaggcgtgctcacctggcgtgctccacccgactgggcgtccgcaggctcctcccccgggtgtggcctccgggcggcatggctgcttcccaggtgatgccggcttcagctagtggggtctagttgaccgttccgcagccgccagggccagcggaaagccggtcagggggaaccgcggcggggctggtgtcatgagcctgaggtgaacttgagggtgcctcctcagcggtctcccgccctgccctgaggggcgccgggaccccaaagagcggaggaagagcgccaccccgacggccaccgcttcggagccagcacgcggggtaccctacggggagcgcggatgcccccgtgttcgggcggggacggctccacccctcctgggccctcccttcgggacagggactgtcccgcccagagtgctgaatacccgcgcgaccgtctggatccccgcccaggaagcccctctgaagcctcctcgccgccgtttctgagaagcagggcacctgttaactggtaccaagaaaaggcccaagtgtttctctggcatctgatggtgtctggatccaccactctactctgtctctggaaacagcccttccacgtctctgcattccctgtcaccgcgtcactggccttcagacagagccaaggtgcagggcaacacctctacaaggatctgcagccatttatattgcttaggctactgatgcctgaggaaacccagacccaagaccaaccgatggaggaggaggaggttgagacgttcgcctttcaggcagaaattgcccagttgatgtcattgatcatcaatactttctactcgaacaaagagatctttctgagagagctcatttcaaattcatcagatgcattggacaaaatccggtatgaaagcttgacagatcccagtaaattagactctgggaaagagctgcatattaaccttataccgaacaaacaagatcgaactctcactattgtggatactggaattggaatgaccaaggctgacttgatcaataaccttggtactatcgccaagtctgggaccaaagcgttcatggaagctttgcaggctggtgcagatatctctatgattggccagttcggtgttggtttttattctgcttatttggttgctgagaaagtaactgtgatcaccaaacataacgatgatgagcagtacgcttgggagtcctcagcagggggatcattcacagtgaggacagacacaggtgaacctatgggtcgtggaacaaaagttatcctacacctgaaagaagaccaaactgagtacttggaggaacgaagaataaaggagattgtgaagaaacattctcagtttattggatatcccattactctttttgtggagaaggaacgtgataaagaagtaagcgatgatgaggctgaagaaaaggaagacaaagaagaagaaaaagaaaaagaagagaaagagtcggaagacaaacctgaaattgaagatgttggttctgatgaggaagaagaaaagaaggatggtgacaagaagaagaagaagaagattaaggaaaagtacatcgatcaagaagagctcaacaaaacaaagcccatctggaccagaaatcccgacgatattactaatgaggagtacggagaattctataagagcttgaccaatgactgggaagatcacttggcagtgaagcatttttcagttgaaggacagttggaattcagagcccttctatttgtcccacgacgtgctccttttgatctgtttgaaaacagaaagaaaaagaacaacatcaaattgtatgtacgcagagttttcatcatggataactgtgaggagctaatccctgaatatctgaacttcattagaggggtggtagactcggaggatctccctctaaacatatcccgtgagatgttgcaacaaagcaaaattttgaaagttatcaggaagaatttggtcaaaaaatgcttagaactctttactgaactggcggaagataaagagaactacaagaaattctatgagcagttctctaaaaacataaagcttggaatacacgaagactctcaaaatcggaagaagctttcagagctgttaaggtactacacatctgcctctggtgatgagatggtttctctcaaggactactgcaccagaatgaaggagaaccagaaacatatctattatatcacaggtgagaccaaggaccaggtagctaactcagcctttgtggaacgtcttcggaaacatggcttagaagtgatctatatgattgagcccattgatgagtactgtgtccaacagctgaaggaatttgaggggaagactttagtgtcagtcaccaaagaaggcctggaacttccagaggatgaagaagagaaaaagaagcaggaagagaaaaaaacaaagtttgagaacctctgcaaaatcatgaaagacatattggagaaaaaagttgaaaaggtggttgtgtcaaaccgattggtgacatctccatgctgtattgtcacaagcacatatggctggacagcaaacatggagagaatcatgaaagctcaagccctaagagacaactcaacaatgggttacatggcagcaaagaaacacctggagataaaccctgaccattccattattgagaccttaaggcaaaaggcagaggctgataagaacgacaagtctgtgaaggatctggtcatcttgctttatgaaactgcgctcctgtcttctggcttcagtctggaagatccccagacacatgctaacaggatctacaggatgatcaaacttggtctgggtattgatgaagatgaccctactgctgatgataccagtgctgctgtaactgaagaaatgccaccccttgaaggagatgacgacacatcacgcatggaagaagtagactaatctctggctgagggatgacttacctgttcagtactctacaattcctctgataatatattttcaaggatgtttttctttatttttgttaatattaaaaagtctgtatggcatgacaactactttaaggggaagataagatttctgtctactaagtgatgctgtgataccttaggcactaaagcagagctagtaatgctttttgagtttcatgttggtttattttcacagattggggtaacgtgcactgtaagacgtatgtaacatgatgttaactttgtggtctaaagtgtttagctgtcaagccggatgcctaagtagaccaaatcttgttattgaagtgttctgagctgtatcttgatgtttagaaaagtattcgttacatcttgtaggatctactttttgaacttttcattccctgtagttgacaattctgcatgtactagtcctctagaaataggttaaactgaagcaacttgatggaaggatctctccacagggcttgttttccaaagaaaagtattgtttggaggagcaaagttaaaagcctacctaagcatatcgtaaagctgttcaaaaataactcagacccagtcttgtggatggaaatgtagtgctcgagtcacattctgcttaaagttgtaacaaatacagatgagttaaaagatattgtgtgacagtgtcttatttagggggaaaggggagtatctggatgacagttagtgccaaaatgtaaaacatgaggcgctagcaggagatggttaaacactagctgctccaagggttgacatggtcttcccagcatgtactcagcaggtgtggggtggagcacacgtaggcacagaaaacaggaatgcagacaacatgcatcccctgcgtccatgagttacatgtgttctcttagtgtccacgttgttttgatgttattcatggaataccttctgtgttaaatacagtcacttaattccttggccttaaaa

SEQ ID NO: 86 - DNA, 2567 bp, Homo sapiens
ctccggcgcagtgttgggactgtctgggtatcggaaagcaagcctacgttgctcactattacgtataatccttttcttttcaagatgcctgaggaagtgcaccatggagaggaggaggtggagacttttgcctttcaggcagaaattgcccaactcatgtccctcatcatcaataccttctattccaacaaggagattttccttcgggagttgatctctaatgcttctgatgccttggacaagattcgctatgagagcctgacagacccttcgaagttggacagtggtaaagagctgaaaattgacatcatccccaaccctcaggaacgtaccctgactttggtagacacaggcattggcatgaccaaagctgatctcataaataatttgggaaccattgccaagtctggtactaaagcattcatggaggctcttcaggctggtgcagacatctccatgattgggcagtttggtgttggcttttattctgcctacttggtggcagagaaagtggttgtgatcacaaagcacaacgatgatgaacagtatgcttgggagtcttctgctggaggttccttcactgtgcgtgctgaccatggtgagcccattggcaggggtaccaaagtgatcctccatcttaaagaagatcagacagagtacctagaagagaggcgggtcaaagaagtagtgaagaagcattctcagttcataggctatcccatcaccctttatttggagaaggaacgagagaaggaaattagtgatgatgaggcagaggaagagaaaggtgagaaagaagaggaagataaagatgatgaagaaaaacccaagatcgaagatgtgggttcagatgaggaggatgacagcggtaaggataagaagaagaaaactaagaagatcaaagagaaatacattgatcaggaagaactaaacaagaccaagcctatttggaccagaaaccctgatgacatcacccaagaggagtatggagaattctacaagagcctcactaatgactgggaagaccacttggcagtcaagcacttttctgtagaaggtcagttggaattcagggcattgctatttattcctcgtcgggctccctttgacctttttgagaacaagaagaaaaagaacaacatcaaactctatgtccgccgtgtgttcatcatggacagctgtgatgagttgataccagagtatctcaattttatccgtggtgtggttgactctgaggatctgcccctgaacatctcccgagaaatgctccagcagagcaaaatcttgaaagtcattcgcaaaaacattgttaagaagtgccttgagctcttctctgagctggcagaagacaaggagaattacaagaaattctatgaggcattctctaaaaatctcaagcttggaatccacgaagactccactaaccgccgccgcctgtctgagctgctgcgctatcatacctcccagtctggagatgagatgacatctctgtcagagtatgtttctcgcatgaaggagacacagaagtccatctattacatcactggtgagagcaaagagcaggtggccaactcagcttttgtggagcgagtgcggaaacggggcttcgaggtggtatatatgaccgagcccattgacgagtactgtgtgcagcagctcaaggaatttgatgggaagagcctggtctcagttaccaaggagggtctggagctgcctgaggatgaggaggagaagaagaagatggaagagagcaaggcaaagtttgagaacctctgcaagctcatgaaagaaatcttagataagaaggttgagaaggtgacaatctccaatagacttgtgtcttcaccttgctgcattgtgaccagcacctacggctggacagccaatatggagcggatcatgaaagcccaggcacttcgggacaactccaccatgggctatatgatggccaaaaagcacctggagatcaaccctgaccaccccattgtggagacgctgcggcagaaggctgaggccgacaagaatgataaggcagttaaggacctggtggtgctgctgtttgaaaccgccctgctatcttctggcttttcccttgaggatccccagacccactccaaccgcatctatcgcatgatcaagctaggtctaggtattgatgaagatgaagtggcagcagaggaacccaatgctgcagttcctgatgagatcccccctctcgagggcgatgaggatgcgtctcgcatggaagaagtcgattaggttaggagttcatagttggaaaacttgtgcccttgtatagtgtccccatgggctcccactgcagcctcgagtgcccctgtcccacctggctccccctgctggtgtctagtgtttttttccctctcctgtccttgtgttgaaggcagtaaactaagggtgtcaagccccattccctctctactcttgacagcaggattggatgttgtgtattgtggtttattttattttcttcattttgttctgaaattaaagtatgcaaaataaagaatatgccgttttaaaaaaaaaaaaaaaaaaaaaaaaaaaaa

SEQ ID NO: 87 - DNA, 965 bp, Homo sapiens
acccgcgcagggtgtgctagcgcgctcagccctctccggccggcttagtctagttcccgggcctcgctcggttccagaactttccagaaaatgccgcgctccctacggctcaagggtcaaatcgcgtcatttccgggaggggacgaaggggtagttctttcacctcggctgggcgcctagaaaagcctagaaacagctccttttttcttccgcctccgagtcttcgcgtcagcgtcctgcgcagggcccttggggcgaatcgcggtgcgcgtcggggcgaccgccctccctccctgggaggggcgagggggctagcggcgaccgctggggcgagcgcgcctgcgcgctgggtgattttttcacgtgtcgccagggccggactgcgagtctctttgcggcgctacactagagcagagtacgagtctgaggcggagggagtaatggcaggacaagcgtttagaaagtttcttccactctttgaccgagtattggttgaaaggagtgctgctgaaactgtaaccaaaggaggcattatgcttccagaaaaatctcaaggaaaagtattgcaagcaacagtagtcgctgttggatcgggttctaaaggaaagggtggagagattcaaccagttagcgtgaaagttggagataaagttcttctcccagaatatggaggcaccaaagtagttctagatgacaaggattatttcctatttagagatggtgacattcttggaaagtacgtagactgaaataagtcactattgaaatggcatcaacatgatgctgcccattccactgaagttctgaaatctttcgtcatgtaaataatttccatatttctcttttataataaactaatgataactaatgacatccagtgtctccaaaattgtttccttgtactgatataaacacttccaaataaaaatatgtaaatgagtggttaatctttaaaaaaaaaaaaa

SEQ ID NO: 88 - DNA, 2551 bp, Homo sapiens
ggaaaacggccagcctgaggagctgctgcgagggtccgcttcgtctttcgagagtgactcccgcggtcccaaggctttccagagcgaacctgtgcggctgcaggcaccggcgtgttgagtttccggcgttccgaaggactgagctcttgtcgcggatcccgtccgccgtttccagcccccagtctcagagcggagcccacagagcagggcaccggcatggccaaagccgcggcgatcggcatcgacctgggcaccacctactcctgcgtgggggtgttccaacacggcaaggtggagatcatcgccaacgaccagggcaaccgcaccacccccagctacgtggccttcacggacaccgagcggctcatcggggatgcggccaagaaccaggtggcgctgaacccgcagaacaccgtgtttgacgcgaagcggctgatcggccgcaagttcggcgacccggtggtgcagtcggacatgaagcactggcctttccaggtgatcaacgacggagacaagcccaaggtgcaggtgagctacaagggggagaccaaggcattctaccccgaggagatctcgtccatggtgctgaccaagatgaaggagatcgccgaggcgtacctgggctacccggtgaccaacgcggtgatcaccgtgccggcctacttcaacgactcgcagcgccaggccaccaaggatgcgggtgtgatcgcggggctcaacgtgctgcggatcatcaacgagcccacggccgccgccatcgcctacggcctggacagaacgggcaagggggagcgcaacgtgctcatctttgacctgggcgggggcaccttcgacgtgtccatcctgacgatcgacgacggcatcttcgaggtgaaggccacggccggggacacccacctgggtggggaggactttgacaacaggctggtgaaccacttcgtggaggagttcaagagaaaacacaagaaggacatcagccagaacaagcgagccgtgaggcggctgcgcaccgcctgcgagagggccaagaggaccctgtcgtccagcacccaggccagcctggagatcgactccctgtttgagggcatcgacttctacacgtccatcaccagggcgaggttcgaggagctgtgctccgacctgttccgaagcaccctggagcccgtggagaaggctctgcgcgacgccaagctggacaaggcccagattcacgacctggtcctggtcgggggctccacccgcatccccaaggtgcagaagctgctgcaggacttcttcaacgggcgcgacctgaacaagagcatcaaccccgacgaggctgtggcctacggggcggcggtgcaggcggccatcctgatgggggacaagtccgagaacgtgcaggacctgctgctgctggacgtggctcccctgtcgctggggctggagacggccggaggcgtgatgactgccctgatcaagcgcaactccaccatccccaccaagcagacgcagatcttcaccacctactccgacaaccaacccggggtgctgatccaggtgtacgagggcgagagggccatgacgaaagacaacaatctgttggggcgcttcgagctgagcggcatccctccggcccccaggggcgtgccccagatcgaggtgaccttcgacatcgatgccaacggcatcctgaacgtcacggccacggacaagagcaccggcaaggccaacaagatcaccatcaccaacgacaagggccgcctgagcaaggaggagatcgagcgcatggtgcaggaggcggagaagtacaaagcggaggacgaggtgcagcgcgagagggtgtcagccaagaacgccctggagtcctacgccttcaacatgaagagcgccgtggaggatgaggggctcaagggcaagatcagcgaggcggacaagaagaaggttctggacaagtgtcaagaggtcatctcgtggctggacgccaacaccttggccgagaaggacgagtttgagcacaagaggaaggagctggagcaggtgtgtaaccccatcatcagcggactgtaccagggtgccggtggtcccgggcctggcggcttcggggctcagggtcccaagggagggtctgggtcaggccctaccattgaggaggtggattaggggcctttgttctttagtatgtttgtctttgaggtggactgttgggactcaaggactttgctgctgttttcctatgtcatttctgcttcagctctttgctgcttcacttctttgtaaagttgtaacctgatggtaattagctggcttcattatttttgtagtacaaccgatatgttcattagaattctttgcatttaatgttgatactgtaagggtgtttcgttccctttaaatgaatcaacactgccaccttctgtacgagtttgtttgttttttttttttttttttttttttgcttggcgaaaacactacaaaggctgggaatgtatgtttttataatttgtttatttaaatatgaaaaataaaatgttaaactttaaaaaaaaaaaaaaaaaaaaaaaaaaaaaaa

SEQ ID NO: 89 - DNA, 2445 bp, Homo sapiens
ataaaagcccaggggcaagcggtccggataacggctagcctgaggagctgctgcgacagtccactacctttttcgagagtgactcccgttgtcccaaggcttcccagagcgaacctgtgcggctgcaggcaccggcgcgtcgagtttccggcgtccggaaggaccgagctcttctcgcggatccagtgttccgtttccagcccccaatctcagagcggagccgacagagagcagggaaccggcatggccaaagccgcggcgatcggcatcgacctgggcaccacctactcctgcgtgggggtgttccaacacggcaaggtggagatcatcgccaacgaccagggcaaccgcaccacccccagctacgtggccttcacggacaccgagcggctcatcggggatgcggccaagaaccaggtggcgctgaacccgcagaacaccgtgtttgacgcgaagcggctgattggccgcaagttcggcgacccggtggtgcagtcggacatgaagcactggcctttccaggtgatcaacgacggagacaagcccaaggtgcaggtgagctacaagggggagaccaaggcattctaccccgaggagatctcgtccatggtgctgaccaagatgaaggagatcgccgaggcgtacctgggctacccggtgaccaacgcggtgatcaccgtgccggcctacttcaacgactcgcagcgccaggccaccaaggatgcgggtgtgatcgcggggctcaacgtgctgcggatcatcaacgagcccacggccgccgccatcgcctacggcctggacagaacgggcaagggggagcgcaacgtgctcatctttgacctgggcgggggcaccttcgacgtgtccatcctgacgatcgacgacggcatcttcgaggtgaaggccacggccggggacacccacctgggtggggaggactttgacaacaggctggtgaaccacttcgtggaggagttcaagagaaaacacaagaaggacatcagccagaacaagcgagccgtgaggcggctgcgcaccgcctgcgagagggccaagaggaccctgtcgtccagcacccaggccagcctggagatcgactccctgtttgagggcatcgacttctacacgtccatcaccagggcgaggttcgaggagctgtgctccgacctgttccgaagcaccctggagcccgtggagaaggctctgcgcgacgccaagctggacaaggcccagattcacgacctggtcctggtcgggggctccacccgcatccccaaggtgcagaagctgctgcaggacttcttcaacgggcgcgacctgaacaagagcatcaaccccgacgaggctgtggcctacggggcggcggtgcaggcggccatcctgatgggggacaagtccgagaacgtgcaggacctgctgctgctggacgtggctcccctgtcgctggggctggagacggccggaggcgtgatgactgccctgatcaagcgcaactccaccatccccaccaagcagacgcagatcttcaccacctactccgacaaccaacccggggtgctgatccaggtgtacgagggcgagagggccatgacgaaagacaacaatctgttggggcgcttcgagctgagcggcatccctccggcccccaggggcgtgccccagatcgaggtgaccttcgacatcgatgccaacggcatcctgaacgtcacggccacggacaagagcaccggcaaggccaacaagatcaccatcaccaacgacaagggccgcctgagcaaggaggagatcgagcgcatggtgcaggaggcggagaagtacaaagcggaggacgaggtgcagcgcgagagggtgtcagccaagaacgccctggagtcctacgccttcaacatgaagagcgccgtggaggatgaggggctcaagggcaagatcagcgaggcggacaagaagaaggtgctggacaagtgtcaagaggtcatctcgtggctggacgccaacaccttggccgagaaggacgagtttgagcacaagaggaaggagctggagcaggtgtgtaaccccatcatcagcggactgtaccagggtgccggtggtcccgggcctgggggcttcggggctcagggtcccaagggagggtctgggtcaggccccaccattgaggaggtagattaggggcctttccaagattgctgtttttgttttggagcttcaagactttgcatttcctagtatttctgtttgtcagttctcaatttcctgtgtttgcaatgttgaaattttttggtgaagtactgaacttgctttttttccggtttctacatgcagagatgaatttatactgccatcttacgactatttcttctttttaatacacttaactcaggccattttttaagttggttacttcaaagtaaataaactttaaaattcaaaaaaaaaaaaaaaaaa

SEQ ID NO: 90 - DNA, 3680 bp, Homo sapiens
tgagtaaatgccgcagattctggaaagttctgatcagtgcgatacataaggctgaggaagtgggacctccccttttgggtcggtagttcagcgccggcgccggtgtgcgagccgcggcagagtgaggcaggcaacccgaggtgcggagcgacctgcggaggctgagccccgctttctcccagggtttcttatcagccagccgccgctgtccccgggggagtaggaggctcctgacaggccgcggctgtctgtgtgtccttctgagtgtcagaggaacggccagaccccgcgggccggagcagaacgcggccagggcagaaagcggcggcaggagaagcaggcagggggccggaggacgcagaccgagacccgaggcggaggcggaccgcgagccggccatgtcggtggtggggttggacgtgggctcgcagagctgctacatcgcggtagcccgggccgggggcatcgagaccatcgccaatgagttcagcgaccggtgcaccccgtcagtcatatcatttggatcaaaaaatagaacaatcggagttgcagccaaaaatcagcaaatcactcatgcaaacaatacggtgtctaacttcaaaagatttcatggccgagcattcaatgaccccttcattcaaaaggagaaggaaaacttgagttacgatttggttccattgaaaaatggtggagttggaataaaggtaatgtacatgggtgaagaacatctatttagtgtggagcagataacagccatgttgttgactaagctgaaggaaactgctgaaaacagcctcaagaaaccagtaacagattgtgttatttcagtcccctccttctttacagatgctgagaggcgatctgtgttagatgctgcacagattgttggcctaaactgtttaagacttatgaatgacatgacagctgttgctttgaattacggaatttataagcaggatctcccaagcctggatgagaaacctcggatagtggtttttgttgatatgggacattcagcttttcaagtgtctgcttgtgcttttaacaagggaaaattgaaggtactgggaacagcttttgatcctttcttaggaggaaaaaacttcgatgaaaagttagtggaacatttttgtgcagaatttaaaactaagtacaagttggatgcaaaatccaaaatacgagcactcctacgtctgtatcaggaatgtgaaaaactgaaaaagctaatgagctctaacagcacagaccttccactgaatatcgaatgctttatgaatgataaagatgtttccggaaagatgaacaggtcacaatttgaagaactctgtgctgaacttctgcaaaagatagaagtacccctttattcactgttggaacaaactcatctcaaagtagaagatgtgagtgcagttgagattgttggaggcgctacacgaattccagctgtgaaggaaagaattgccaaattctttggaaaagatattagcacaacactcaatgcagatgaagcagtagccagaggatgtgcattacagtgtgcaatactttccccggcatttaaagttagagaattttccgtcacagatgcagttccttttccaatatctctgatctggaaccatgattcagaagatactgaaggtgttcatgaagtctttagtcgaaaccatgctgctcctttctccaaagttctcacctttctgagaagggggccttttgagctagaagctttctattctgatccccaaggagttccatatccagaagcaaaaataggccgctttgtagttcagaatgtttctgcacagaaagatggagaaaaatctagagtaaaagtcaaagtgcgagtcaacacccatggcattttcaccatctctacggcatctatggtggagaaagtcccaactgaggagaatgaaatgtcttctgaagctgacatggagtgtctgaatcagagaccaccagaaaacccagacactgataaaaatgtccagcaagacaacagtgaagctggaacacagccccaggtacaaactgatgctcaacaaacctcacagtctcccccttcacctgaacttacctcagaagaaaacaaaatcccagatgctgacaaagcaaatgaaaaaaaagttgaccagcctccagaagctaaaaagcccaaaataaaggtggtgaatgttgagctgcctattgaagccaacttggtctggcagttagggaaagaccttcttaacatgtatattgagacagagggtaagatgataatgcaagataaattggaaaaagaaaggaatgatgctaaaaatgcagttgaggaatatgtgtatgagttcagagacaagctgtgtggaccatatgaaaaatttatatgtgagcaggatcatcaaaattttttgagactcctcacagaaactgaagactggctgtatgaagaaggagaggaccaagctaaacaagcatatgttgacaagttggaagaattaatgaaaattggcactccagttaaagttcggtttcaggaagctgaagaacggccaaaaatgtttgaagaactaggacagaggctgcagcattatgccaagatagcagctgacttcagaaataaggatgagaaatacaaccatattgatgagtctgaaatgaaaaaagtggagaagtctgttaatgaagtgatggaatggatgaataatgtcatgaatgctcaggctaaaaagagtcttgatcaggatccagttgtacgtgctcaggaaattaaaacaaaaatcaaggaattgaacaacacatgtgaacccgttgtaacacaaccgaaaccaaaaattgaatcacccaaactggaaagaactccaaatggcccaaatattgataaaaaggaagaagatttagaagacaaaaacaattttggtgctgaacctccacatcagaatggtgaatgttaccctaatgagaaaaattctgttaatatggacttggactagataaccttaaattggcctattccttcaattaataaaatatttttgccatagtatgtgactctacataacatactgaaactatttatattttcttttttaaggatatttagaaattttgtgtattatatggaaaaagaaaaaaagcttaagtctgtagtctttatgatcctaaaagggaaaattgccttggtaactttcagattcctgtggaattgtgaattcatactaagctttctgtgcagtctcaccatttgcatcactgaggatgaaactgacttttgtcttttggagaaaaaaaactgtactgcttgttcaagagggctgtgattaaaatctttaagcatttgttcctgccaaggtagttttcttgcattttgctctccattcagcatgtgtgtgggtgtggatgtttataaacaagactaagtctgacttcataagggctttctaaaaccatttctgtccaagagaaaatgactttttgctttgatattaaaaattcaatgagtaaaacaaaagctagtcaaatgtgttagcagcatgcagaacaaaaactttaaactttctctctcactatacagtatattgtcatgtgaaagtgtggaatggaagaaatgtcgatcctgttgtaactgattgtgaacacttttatgagctttaaaataaagttcatcttatggtgtcatttctaaaaaaaaaaaaaaa

SEQ ID NO: 91 - DNA, 2802 bp, Homo sapiens
ccagcagcaggaggcgcgcgaggcaccacggcctggcggccgagagtcagggaggaacctcatttacataacggccgcccctctgtctcctggcgggggccggagtcccgcccctcgtccaacttgaaatctgttgggtcacgggccagtcactccgacctaggcaagcctgtggtggagctggaagagtttgtgagggcggtcccgggagcggattgggtctgggagttcccagaggcggctataagaaccgggaactgggcgcggggagctgagttgctggtagtgcccgtggtgcttggttcgaggtggccgttagttgactccgcggagttcatctccctggttttcccgtcctaacgtcgctcgcctttcagtcaggatgtctgcccgtggcccggctatcggcatcgacctgggcaccacctattcgtgcgtcggggtcttccaacatggcaaggtggagatcatcgccaacgaccagggcaatcgcaccacccccagctacgtggccttcacggacaccgagcgcctcatcggcgacgccgccaagaaccaggtggccatgaaccccaccaacaccatcttcgacgccaagaggctgattggacggaaattcgaggatgccacagtgcagtcggatatgaaacactggccgttccgggtggtgagcgagggaggcaagcccaaagtgcaagtagagtacaagggggagaccaagaccttcttcccagaggagatatcctccatggtcctcacgaagatgaaggagatcgcggaagcctacctggggggcaaggtgcacagcgcggtcataacggtcccggcctatttcaacgactcgcagcgccaggccaccaaggacgcaggcaccatcacggggctcaatgtgctgcgcatcatcaacgagcccacggcggcggccatcgcctacggcctggacaagaagggctgcgcgggcggcgagaagaacgtgctcatctttgacctgggcggtggcactttcgacgtgtccatcctgaccatcgaggatggcatcttcgaggtgaagtccacggccggcgacacccacctgggcggtgaggacttcgacaaccgcatggtgagccacctggcggaggagttcaagcgcaagcacaagaaggacattgggcccaacaagcgcgccgtgaggcggctgcgcaccgcttgcgagcgcgccaagcgcaccctgagctcgtccacgcaggcgagcatcgagatcgactcgctctacgagggcgtggacttctatacgtccatcacgcgcgcccgcttcgaggagctcaatgccgacctctttcgcgggaccctggagccggtggagaaggcgctgcgcgacgccaagctggacaagggccagatccaggagatcgtgctggtgggcggctccactcgtatccccaagatccagaagctgctgcaggatttcttcaacggcaaggagctgaacaagagcatcaaccccgacgaggcggtggcctatggcgccgcggtgcaggcggccatcctcatcggcgacaaatcagagaatgtgcaggacctgctgctactcgacgtgaccccgttgtcgctgggcatcgagacagctggcggtgtcatgaccccactcatcaagaggaacaccacgatccccaccaagcagacgcagaccttcaccacctactcggacaaccagagcagcgtactggtgcaggtatacgagggcgaacgggccatgaccaaggacaataacctgctgggcaagttcgacctgaccgggattccccctgcgcctcgcggggtcccccaaatcgaggttaccttcgacattgacgccaatggcatccttaacgttaccgccgccgacaagagcaccggtaaggaaaacaaaatcaccatcaccaatgacaaaggtcgtctgagcaaggacgacattgaccggatggtgcaggaggcggagcggtacaaatcggaagatgaggcgaatcgcgaccgagtcgcggccaaaaacgccctggagtcctatacctacaacatcaagcagacggtggaagacgagaaactgaggggcaagattagcgagcaggacaaaaacaagatcctcgacaagtgtcaggaggtgatcaactggctcgaccgaaaccagatggcagagaaagatgagtatgaacacaagcagaaagagctcgaaagagtttgcaaccccatcatcagcaaactttaccaaggtggtcctggcggcggcagcggcggcggcggttcaggagcctccgggggacccaccatcgaagaagtggactaagcttgcactcaagtcagcgtaaacctctttgcctttctctctctctctttttttttgtttgtttctttgaaatgtccttgtgccaagtacgagatctattgttggaagtctttggtatatgcaaatgaaaggagaggtgcaacaacttagtttaattataaaagttccaaagtttgttttttaaaaacattattcgaggtttctctttaatgcattttgcgtgtttgctgacttgagcatttttgattagttcgtgcatggagatttgtttgagatgagaaaccttaagtttgcacacctgttctgtagaagcttggaaacagtaaaatatataggagcttaaattgtttatttttatgtactactttaaaactaaactgaacattgcagtaatgttaaggacaggtatactttttgcaaacaaatgcataaatgcaaatgtaaagtaaagctgaaattgatctcaaaaaaaaaaaaaaaaaaaaaaaaaaaaaaaaaaa

SEQ ID NO: 92 - DNA, 787 bp, Homo sapiens
gaaaagacaagagagcattccgtgctatgattcaggcctaattaagtgattgcgtctgggcacggctataaaccactagctgcttcaactggtaatccagtcagtaggcaactgcaggggctcgccactgactgaaggcagtggaaggttggcagaaggaggctgttcaaggctgtttttgccttcactatggcaaaaatcattttgaggcacctcatagagattccagtgcgttaccaggaagagtttgaagctcgaggtctagaagactgcaggctggatcatgctttatatgcactgcctgggccaaccatcgtggacctgaggaaaaccagggcagcgcagtctcctccagtggactcagcggcagagacgccaccccgagaaggcaaatcccactttcagatcctgctggacgtggtccagttcctccctgaagacatcatcattcagaccttcgaaggctggctgctgataaaagcacaacacggaaccagaatggatgagcacggttttatctcaagaagcttcacccgacagtacaaactaccagatggtgtggaaatcaaagatttgtctgcagtcctctgtcatgatggaattttggtggtggaagtaaaggatccagttgggactaagtgacatcgtatcggttcctgttcagatgacatggggaagatgatggttcagccactggtactacgagaatgtttgtattacccacatttgaaatgatttgctatgatttttatgaagattaaaaatatatacacagttcctggtaaaa

SEQ ID NO: 93 - DNA, 6492 bp, Homo sapiens
tttctgtgaagcagaagtctgggaatcgatctggaaatcctcctaatttttactccctctccccgcgactcctgattcattgggaagtttcaaatcagctataactggagagtgctgaagattgatgggatcgttgccttatgcatttgttttggttttacaaaaaggaaacttgacagaggatcatgctgtacttaaaaaatacaacatcacagaggaagtagactgatattaacaatacttactaataataacgtgcctcatgaaataaagatccgaaaggaattggaataaaaatttcctgcatctcatgccaagggggaaacaccagaatcaagtgttccgcgtgattgaagacaccccctcgtccaagaatgcaaagcacatccaataaaatagctggattataactcctcttctttctctgggggccgtggggtgggagctggggcgagaggtgccgttggcccccgttgcttttcctctgggaaggatggcgcacgctgggagaacagggtacgataaccgggagatagtgatgaagtacatccattataagctgtcgcagaggggctacgagtgggatgcgggagatgtgggcgccgcgcccccgggggccgcccccgcaccgggcatcttctcctcccagcccgggcacacgccccatccagccgcatcccgggacccggtcgccaggacctcgccgctgcagaccccggctgcccccggcgccgccgcggggcctgcgctcagcccggtgccacctgtggtccacctgaccctccgccaggccggcgacgacttctcccgccgctaccgccgcgacttcgccgagatgtccagccagctgcacctgacgcccttcaccgcgcggggacgctttgccacggtggtggaggagctcttcagggacggggtgaactgggggaggattgtggccttctttgagttcggtggggtcatgtgtgtggagagcgtcaaccgggagatgtcgcccctggtggacaacatcgccctgtggatgactgagtacctgaaccggcacctgcacacctggatccaggataacggaggctgggatgcctttgtggaactgtacggccccagcatgcggcctctgtttgatttctcctggctgtctctgaagactctgctcagtttggccctggtgggagcttgcatcaccctgggtgcctatctgggccacaagtgaagtcaacatgcctgccccaaacaaatatgcaaaaggttcactaaagcagtagaaataatatgcattgtcagtgatgtaccatgaaacaaagctgcaggctgtttaagaaaaaataacacacatataaacatcacacacacagacagacacacacacacacaacaattaacagtcttcaggcaaaacgtcgaatcagctatttactgccaaagggaaatatcatttattttttacattattaagaaaaaaagatttatttatttaagacagtcccatcaaaactcctgtctttggaaatccgaccactaattgccaagcaccgcttcgtgtggctccacctggatgttctgtgcctgtaaacatagattcgctttccatgttgttggccggatcaccatctgaagagcagacggatggaaaaaggacctgatcattggggaagctggctttctggctgctggaggctggggagaaggtgttcattcacttgcatttctttgccctgggggctgtgatattaacagagggagggttcctgtggggggaagtccatgcctccctggcctgaagaagagactctttgcatatgactcacatgatgcatacctggtgggaggaaaagagttgggaacttcagatggacctagtacccactgagatttccacgccgaaggacagcgatgggaaaaatgcccttaaatcataggaaagtatttttttaagctaccaattgtgccgagaaaagcattttagcaatttatacaatatcatccagtaccttaagccctgattgtgtatattcatatattttggatacgcaccccccaactcccaatactggctctgtctgagtaagaaacagaatcctctggaacttgaggaagtgaacatttcggtgacttccgcatcaggaaggctagagttacccagagcatcaggccgccacaagtgcctgcttttaggagaccgaagtccgcagaacctgcctgtgtcccagcttggaggcctggtcctggaactgagccggggccctcactggcctcctccagggatgatcaacagggcagtgtggtctccgaatgtctggaagctgatggagctcagaattccactgtcaagaaagagcagtagaggggtgtggctgggcctgtcaccctggggccctccaggtaggcccgttttcacgtggagcatgggagccacgacccttcttaagacatgtatcactgtagagggaaggaacagaggccctgggcccttcctatcagaaggacatggtgaaggctgggaacgtgaggagaggcaatggccacggcccattttggctgtagcacatggcacgttggctgtgtggccttggcccacctgtgagtttaaagcaaggctttaaatgactttggagagggtcacaaatcctaaaagaagcattgaagtgaggtgtcatggattaattgacccctgtctatggaattacatgtaaaacattatcttgtcactgtagtttggttttatttgaaaacctgacaaaaaaaaagttccaggtgtggaatatgggggttatctgtacatcctggggcattaaaaaaaaaatcaatggtggggaactataaagaagtaacaaaagaagtgacatcttcagcaaataaactaggaaatttttttttcttccagtttagaatcagccttgaaacattgatggaataactctgtggcattattgcattatataccatttatctgtattaactttggaatgtactctgttcaatgtttaatgctgtggttgatatttcgaaagctgctttaaaaaaatacatgcatctcagcgtttttttgtttttaattgtatttagttatggcctatacactatttgtgagcaaaggtgatcgttttctgtttgagatttttatctcttgattcttcaaaagcattctgagaaggtgagataagccctgagtctcagctacctaagaaaaacctggatgtcactggccactgaggagctttgtttcaaccaagtcatgtgcatttccacgtcaacagaattgtttattgtgacagttatatctgttgtccctttgaccttgtttcttgaaggtttcctcgtccctgggcaattccgcatttaattcatggtattcaggattacatgcatgtttggttaaacccatgagattcattcagttaaaaatccagatggcaaatgaccagcagattcaaatctatggtggtttgacctttagagagttgctttacgtggcctgtttcaacacagacccacccagagccctcctgccctccttccgcgggggctttctcatggctgtccttcagggtcttcctgaaatgcagtggtgcttacgctccaccaagaaagcaggaaacctgtggtatgaagccagacctccccggcgggcctcagggaacagaatgatcagacctttgaatgattctaatttttaagcaaaatattattttatgaaaggtttacattgtcaaagtgatgaatatggaatatccaatcctgtgctgctatcctgccaaaatcattttaatggagtcagtttgcagtatgctccacgtggtaagatcctccaagctgctttagaagtaacaatgaagaacgtggacgtttttaatataaagcctgttttgtcttttgttgttgttcaaacgggattcacagagtatttgaaaaatgtatatatattaagaggtcacgggggctaattgctggctggctgccttttgctgtggggttttgttacctggttttaataacagtaaatgtgcccagcctcttggccccagaactgtacagtattgtggctgcacttgctctaagagtagttgatgttgcattttccttattgttaaaaacatgttagaagcaatgaatgtatataaaagcctcaactagtcatttttttctcctcttcttttttttcattatatctaattattttgcagttgggcaacagagaaccatccctattttgtattgaagagggattcacatctgcatcttaactgctctttatgaatgaaaaaacagtcctctgtatgtactcctctttacactggccagggtcagagttaaatagagtatatgcactttccaaattggggacaagggctctaaaaaaagccccaaaaggagaagaacatctgagaacctcctcggccctcccagtccctcgctgcacaaatactccgcaagagaggccagaatgacagctgacagggtctatggccatcgggtcgtctccgaagatttggcaggggcagaaaactctggcaggcttaagatttggaataaagtcacagaattaaggaagcacctcaatttagttcaaacaagacgccaacattctctccacagctcacttacctctctgtgttcagatgtggccttccatttatatgtgatctttgttttattagtaaatgcttatcatctaaagatgtagctctggcccagtgggaaaaattaggaagtgattataaatcgagaggagttataataatcaagattaaatgtaaataatcagggcaatcccaacacatgtctagctttcacctccaggatctattgagtgaacagaattgcaaatagtctctatttgtaattgaacttatcctaaaacaaatagtttataaatgtgaacttaaactctaattaattccaactgtacttttaaggcagtggctgtttttagactttcttatcacttatagttagtaatgtacacctactctatcagagaaaaacaggaaaggctcgaaatacaagccattctaaggaaattagggagtcagttgaaattctattctgatcttattctgtggtgtcttttgcagcccagacaaatgtggttacacactttttaagaaatacaattctacattgtcaagcttatgaaggttccaatcagatctttattgttattcaatttggatctttcagggattttttttttaaattattatgggacaaaggacatttgttggaggggtgggagggaggaagaatttttaaatgtaaaacattcccaagtttggatcagggagttggaagttttcagaataaccagaactaagggtatgaaggacctgtattggggtcgatgtgatgcctctgcgaagaaccttgtgtgacaaatgagaaacattttgaagtttgtggtacgacctttagattccagagacatcagcatggctcaaagtgcagctccgtttggcagtgcaatggtataaatttcaagctggatatgtctaatgggtatttaaacaataaatgtgcagttttaactaacaggatatttaatgacaaccttctggttggtagggacatctgtttctaaatgtttattatgtacaatacagaaaaaaattttataaaattaagcaatgtgaaactgaattggagagtgataatacaagtcctttagtcttacccagtgaatcattctgttccatgtctttggacaaccatgaccttggacaatcatgaaatatgcatctcactggatgcaaagaaaatcagatggagcatgaatggtactgtaccggttcatctggactgccccagaaaaataacttcaagcaaacatcctatcaacaacaaggttgttctgcataccaagctgagcacagaagatgggaacactggtggaggatggaaaggctcgctcaatcaagaaaattctgagactattaataaataagactgtagtgtagatactgagtaaatccatgcacctaaaccttttggaaaatctgccgtgggccctccagatagctcatttcattaagtttttccctccaaggtagaatttgcaagagtgacagtggattgcatttcttttggggaagctttcttttggtggttttgtttattataccttcttaagttttcaaccaaggtttgcttttgttttgagttactggggttatttttgttttaaataaaaataagtgtacaataagtgtttttgtattgaaagcttttgttatcaagattttcatacttttaccttccatggctctttttaagattgatacttttaagaggtggctgatattctgcaacactgtacacataaaaaatacggtaaggatactttacatggttaaggtaaagtaagtctccagttggccaccattagctataatggcactttgtttgtgttgttggaaaaagtcacattgccattaaactttccttgtctgtctagttaatattgtgaagaaaaataaagtacagtgtgagatactg

SEQ ID NO: 94 - DNA, 1207 bp, Homo sapiens
tttctgtgaagcagaagtctgggaatcgatctggaaatcctcctaatttttactccctctccccgcgactcctgattcattgggaagtttcaaatcagctataactggagagtgctgaagattgatgggatcgttgccttatgcatttgttttggttttacaaaaaggaaacttgacagaggatcatgctgtacttaaaaaatacaacatcacagaggaagtagactgatattaacaatacttactaataataacgtgcctcatgaaataaagatccgaaaggaattggaataaaaatttcctgcatctcatgccaagggggaaacaccagaatcaagtgttccgcgtgattgaagacaccccctcgtccaagaatgcaaagcacatccaataaaatagctggattataactcctcttctttctctgggggccgtggggtgggagctggggcgagaggtgccgttggcccccgttgcttttcctctgggaaggatggcgcacgctgggagaacagggtacgataaccgggagatagtgatgaagtacatccattataagctgtcgcagaggggctacgagtgggatgcgggagatgtgggcgccgcgcccccgggggccgcccccgcaccgggcatcttctcctcccagcccgggcacacgccccatccagccgcatcccgggacccggtcgccaggacctcgccgctgcagaccccggctgcccccggcgccgccgcggggcctgcgctcagcccggtgccacctgtggtccacctgaccctccgccaggccggcgacgacttctcccgccgctaccgccgcgacttcgccgagatgtccagccagctgcacctgacgcccttcaccgcgcggggacgctttgccacggtggtggaggagctcttcagggacggggtgaactgggggaggattgtggccttctttgagttcggtggggtcatgtgtgtggagagcgtcaaccgggagatgtcgcccctggtggacaacatcgccctgtggatgactgagtacctgaaccggcacctgcacacctggatccaggataacggaggctgggtaggtgcacttggtgatgtgagtctgggctgaggccacaggtccgagatgcgggggttggagtgcgggtgggctcctggggcaatgggaggctgtggagccggcgaaataaaatcagagttgttgcta

SEQ ID NO: 95 - DNA, 2386 bp, Homo sapiens
atgggcaacttgaagagcgtggcccaggagcctgggccaccctgcggcctggggctggggctgggccttgggctgtgcggcaagcagggcccagccaccccggcccctgagcccagccgggccccagcatccctactcccaccagcgccagaacacagccccccgagctccccgctaacccagcccccagaggggcccaagttccctcgtgtgaagaactgggaggtggggagcatcacctatgacaccctcagcgcccaggcgcagcaggatgggccctgcaccccaagacgctgcctgggctccctggtatttccacggaaactacagggccggccctcccccggccccccggcccctgagcagctgctgagtcaggcccgggacttcatcaaccagtactacagctccattaagaggagcggctcccaggcccacgaacagcggcttcaagaggtggaagccgaggtggcagccacaggcacctaccagcttagggagagcgagctggtgttcggggctaagcaggcctggcgcaacgctccccgctgcgtgggccggatccagtgggggaagctgcaggtgttcgatgcccgggactgcaggtctgcacaggaaatgttcacctacatctgcaaccacatcaagtatgccaccaaccggggcaaccttcgctcggccatcacagtgttcccgcagcgctgccctggccgaggagacttccgaatctggaacagccagctggtgcgctacgcgggctaccggcagcaggatggctctgtgcggggggacccagccaacgtggagatcaccgagctctgcattcagcacggctggaccccaggaaacggtcgcttcgacgtgctgcccctgctgctgcaggccccagatgatcccccagaactcttccttctgccccccgagctggtccttgaggtgcccctggagcaccccacgctggagtggtttgcagccctgggcctgcgctggtacgccctcccggcagtgtccaacatgctgctggaaattgggggcctggagttccccgcagcccccttcagtggctggtacatgagcactgagatcggcacgaggaacctgtgtgaccctcaccgctacaacatcctggaggatgtggctgtctgcatggacctggatacccggaccacctcgtccctgtggaaagacaaggcagcagtggaaatcaacgtggccgtgctgcacagttaccagctagccaaagtcaccatcgtggaccaccacgccgccacggcctctttcatgaagcacctggagaatgagcagaaggccagggggggctgccctgcagactgggcctggatcgtgccccccatctcgggcagcctcactcctgttttccatcaggagatggtcaactatttcctgtccccggccttccgctaccagccagacccctggaaggggagtgccgccaagggcaccggcatcaccaggaagaagacctttaaagaagtggccaacgccgtgaagatctccgcctcgctcatgggcacggtgatggcgaagcgagtgaaggcgacaatcctgtatggctccgagaccggccgggcccagagctacgcacagcagctggggagactcttccggaaggcttttgatccccgggtcctgtgtatggatgagtatgacgtggtgtccctcgaacacgagacgctggtgctggtggtaaccagcacatttgggaatggggatcccccggagaatggagagagatggggtttcgccatgttgcccaggctggtctctaactcctgggttcaagcaatccacctgcctcggcctcccaaagtgctgcgattatagacgtgagccactgcacctggccctcagtatcttaagcaagttggaatctcgtgaaaccctttttgctgccttagtgtccgtttcagccctcattctgacctaccttttcaagaaaaatagcaccagcaattgacttttttttagcataaaggtgtatagacacccatataacctacagccttcacaaggcatagcacattttcaccaccctggaaagttccctcatcagttcctcacgtgaatcccttcccagtctgtctccctgccagaagtgtctgtcaccacagaatagtttcgcctgctctagaacggcacctagatggaagcacgcagtgttgcggcgtctcctgctgaggctgtttttgaggcgcactcgtgttgctgcgtgactcagtatttcactcattctgctgctgagtgccgttcattgtgtgaatatccccagtttgtttacccattctcttgttggtgacacttgggctgtttccaggtcggggctattatgaataaacctgttatgaacattcttgtaaaaaaaaaa

SEQ ID NO: 96 - DNA, 4345 bp, Homo sapiens
actgaaactaggggcaaggagacgaagagaacatgaaagttaaactttaagatgaagaacaaagctgaacatactgatgcattggatctttggagaggatctcagaactcattgtacttaatttacaggctaaaaccttagaagaggaatttattatatcctacacaagactccagggaagcacatggccttggactgaaggctggcatctggaagctgtcagccaccagcaccttctgcagcaggaaaaggccagggctctgctggagcaggcagcagagtggacgcacagtaacatgggcaacttgaagagcgtggcccaggagcctgggccaccctgcggcctggggctggggctgggccttgggctgtgcggcaagcagggcccagccaccccggcccctgagcccagccgggccccagcatccctactcccaccagcgccagaacacagccccccgagctccccgctaacccagcccccagaggggcccaagttccctcgtgtgaagaactgggaggtggggagcatcacctatgacaccctcagcgcccaggcgcagcaggatgggccctgcaccccaagacgctgcctgggctccctggtatttccacggaaactacagggccggccctcccccggccccccggcccctgagcagctgctgagtcaggcccgggacttcatcaaccagtactacagctccattaagaggagcggctcccaggcccacgaacagcggcttcaagaggtggaagccgaggtggcagccacaggcacctaccagcttagggagagcgagctggtgttcggggctaagcaggcctggcgcaacgctccccgctgcgtgggccggatccagtgggggaagctgcaggtgttcgatgcccgggactgcaggtctgcacaggaaatgttcacctacatctgcaaccacatcaagtatgccaccaaccggggcaaccttcgctcggccatcacagtgttcccgcagcgctgccctggccgaggagacttccgaatctggaacagccagctggtgcgctacgcgggctaccggcagcaggatggctctgtgcggggggacccagccaacgtggagatcaccgagctctgcattcagcacggctggaccccaggaaacggtcgcttcgacgtgctgcccctgctgctgcaggccccagatgatcccccagaactcttccttctgccccccgagctggtccttgaggtgcccctggagcaccccacgctggagtggtttgcagccctgggcctgcgctggtacgccctcccggcagtgtccaacatgctgctggaaattgggggcctggagttccccgcagcccccttcagtggctggtacatgagcactgagatcggcacgaggaacctgtgtgaccctcaccgctacaacatcctggaggatgtggctgtctgcatggacctggatacccggaccacctcgtccctgtggaaagacaaggcagcagtggaaatcaacgtggccgtgctgcacagttaccagctagccaaagtcaccatcgtggaccaccacgccgccacggcctctttcatgaagcacctggagaatgagcagaaggccagggggggctgccctgcagactgggcctggatcgtgccccccatctcgggcagcctcactcctgttttccatcaggagatggtcaactatttcctgtccccggccttccgctaccagccagacccctggaaggggagtgccgccaagggcaccggcatcaccaggaagaagacctttaaagaagtggccaacgccgtgaagatctccgcctcgctcatgggcacggtgatggcgaagcgagtgaaggcgacaatcctgtatggctccgagaccggccgggcccagagctacgcacagcagctggggagactcttccggaaggcttttgatccccgggtcctgtgtatggatgagtatgacgtggtgtccctcgaacacgagacgctggtgctggtggtaaccagcacatttgggaatggggatcccccggagaatggagagagctttgcagctgccctgatggagatgtccggcccctacaacagctcccctcggccggaacagcacaagagttataagatccgcttcaacagcatctcctgctcagacccactggtgtcctcttggcggcggaagaggaaggagtccagtaacacagacagtgcaggggccctgggcaccctcaggttctgtgtgttcgggctcggctcccgggcatacccccacttctgcgcctttgctcgtgccgtggacacacggctggaggaactgggcggggagcggctgctgcagctgggccagggcgacgagctgtgcggccaggaggaggccttccgaggctgggcccaggctgccttccaggccgcctgtgagaccttctgtgtgggagaggatgccaaggccgccgcccgagacatcttcagccccaaacggagctggaagcgccagaggtaccggctgagcgcccaggccgagggcctgcagttgctgccaggtctgatccacgtgcacaggcggaagatgttccaggctacaatccgctcagtggaaaacctgcaaagcagcaagtccacgagggccaccatcctggtgcgcctggacaccggaggccaggaggggctgcagtaccagccgggggaccacataggtgtctgcccgcccaaccggcccggccttgtggaggcgctgctgagccgcgtggaggacccgccggcgcccactgagcccgtggcagtagagcagctggagaagggcagccctggtggccctccccccggctgggtgcgggacccccggctgcccccgtgcacgctgcgccaggctctcaccttcttcctggacatcacctccccacccagccctcagctcttgcggctgctcagcaccttggcagaagagcccagggaacagcaggagctggaggccctcagccaggatccccgacgctacgaggagtggaagtggttccgctgccccacgctgctggaggtgctggagcagttcccgtcggtggcgctgcctgccccactgctcctcacccagctgcctctgctccagccccggtactactcagtcagctcggcacccagcacccacccaggagagatccacctcactgtagctgtgctggcatacaggactcaggatgggctgggccccctgcactatggagtctgctccacgtggctaagccagctcaagcccggagaccctgtgccctgcttcatccggggggctccctccttccggctgccacccgatcccagcttgccctgcatcctggtgggtccaggcactggcattgcccccttccggggattctggcaggagcggctgcatgacattgagagcaaagggctgcagcccactcccatgactttggtgttcggctgccgatgctcccaacttgaccatctctaccgcgacgaggtgcagaacgcccagcagcgcggggtgtttggccgagtcctcaccgccttctcccgggaacctgacaaccccaagacctacgtgcaggacatcctgaggacggagctggctgcggaggtgcaccgcgtgctgtgcctcgagcggggccacatgtttgtctgcggcgatgttaccatggcaaccaacgtcctgcagaccgtgcagcgcatcctggcgacggagggcgacatggagctggacgaggccggcgacgtcatcggcgtgctgcgggatcagcaacgctaccacgaagacattttcgggctcacgctgcgcacccaggaggtgacaagccgcatacgcacccagagcttttccttgcaggagcgtcagttgcggggcgcagtgccctgggcgttcgaccctcccggctcagacaccaacagcccctgagagccgcctggctttcccttccagttccgggagagcggctgcccgactcaggtccgcccgaccaggatcagccccgctcctcccctcttgaggtggtgccttctcacatctgtccagaggctgcaaggattcagcattattcctccaggaaggagcaaaacgcctcttttccctctctaggcctgttgcctcgggcctgggtccgccttaatctggaaggcccctcccagcagcggtaccccagggcctactgccacccgcttcctgtttcttagtcgaatgttagattcctcttgcctctctcaggagtatcttacctgtaaagtctaatctctaaatcaagtatttattattgaagatttaccataagggactgtgccagatgttaggagaactactaaagtgcctaccccagctcatgtggattacaaaaaaaa

SEQ ID NO: 97 - DNA, 2546 bp, Homo sapiens
atgggcaacttgaagagcgtggcccaggagcctgggccaccctgcggcctggggctggggctgggccttgggctgtgcggcaagcagggcccagccaccccggcccctgagcccagccgggccccagcatccctactcccaccagcgccagaacacagccccccgagctccccgctaacccagcccccagaggggcccaagttccctcgtgtgaagaactgggaggtggggagcatcacctatgacaccctcagcgcccaggcgcagcaggatgggccctgcaccccaagacgctgcctgggctccctggtatttccacggaaactacagggccggccctcccccggccccccggcccctgagcagctgctgagtcaggcccgggacttcatcaaccagtactacagctccattaagaggagcggctcccaggcccacgaacagcggcttcaagaggtggaagccgaggtggcagccacaggcacctaccagcttagggagagcgagctggtgttcggggctaagcaggcctggcgcaacgctccccgctgcgtgggccggatccagtgggggaagctgcaggtgttcgatgcccgggactgcaggtctgcacaggaaatgttcacctacatctgcaaccacatcaagtatgccaccaaccggggcaaccttcgctcggccatcacagtgttcccgcagcgctgccctggccgaggagacttccgaatctggaacagccagctggtgcgctacgcgggctaccggcagcaggatggctctgtgcggggggacccagccaacgtggagatcaccgagctctgcattcagcacggctggaccccaggaaacggtcgcttcgacgtgctgcccctgctgctgcaggccccagatgatcccccagaactcttccttctgccccccgagctggtccttgaggtgcccctggagcaccccacgctggagtggtttgcagccctgggcctgcgctggtacgccctcccggcagtgtccaacatgctgctggaaattgggggcctggagttccccgcagcccccttcagtggctggtacatgagcactgagatcggcacgaggaacctgtgtgaccctcaccgctacaacatcctggaggatgtggctgtctgcatggacctggatacccggaccacctcgtccctgtggaaagacaaggcagcagtggaaatcaacgtggccgtgctgcacagttaccagctagccaaagtcaccatcgtggaccaccacgccgccacggcctctttcatgaagcacctggagaatgagcagaaggccagggggggctgccctgcagactgggcctggatcgtgccccccatctcgggcagcctcactcctgttttccatcaggagatggtcaactatttcctgtccccggccttccgctaccagccagacccctggaaggggagtgccgccaagggcaccggcatcaccaggaagaagacctttaaagaagtggccaacgccgtgaagatctccgcctcgctcatgggcacggtgatggcgaagcgagtgaaggcgacaatcctgtatggctccgagaccggccgggcccagagctacgcacagcagctggggagactcttccggaaggcttttgatccccgggtcctgtgtatggatgagtatgacgtggtgtccctcgaacacgagacgctggtgctggtggtaaccagcacatttgggaatggggatcccccggagaatggagagggtctcactttgtggcccaggctggagtgcagtagtacaatcacggctcactgcagcctcaacctcctagactcaagcaatcctcccacttcaacctcccaagtagttgggactacaggcgcatgccatgatgcctagctaatttttgtattttttatagagatggggtttcgccatgttgcccaggctggtctctaactcctgggttcaagcaatccacctgcctcggcctcccaaagtgctgcgattatagacgtgagccactgcacctggccctcagtatcttaagcaagttggaatctcgtgaaaccctttttgctgccttagtgtccgtttcagccctcattctgacctaccttttcaagaaaaatagcaccagcaattgacttttttttagcataaaggtgtatagacacccatataacctacagccttcacaaggcatagcacattttcaccaccctggaaagttccctcatcagttcctcacgtgaatcccttcccagtctgtctccctgccagaagtgtctgtcaccacagaatagtttcgcctgctctagaacggcacctagatggaagcacgcagtgttgcggcgtctcctgctgaggctgtttttgaggcgcactcgtgttgctgcgtgactcagtatttcactcattctgctgctgagtgccgttcattgtgtgaatatccccagtttgtttacccattctcttgttggtgacacttgggctgtttccaggtcggggctattatgaataaacctgttatgaacattcttgtaaaaaaaaaa

SEQ ID NO: 98 - DNA, 2040 bp, Homo sapiens
atgggcaacttgaagagcgtggcccaggagcctgggccaccctgcggcctggggctggggctgggccttgggctgtgcggcaagcagggcccagccaccccggcccctgagcccagccgggccccagcatccctactcccaccagcgccagaacacagccccccgagctccccgctaacccagcccccagaggggcccaagttccctcgtgtgaagaactgggaggtggggagcatcacctatgacaccctcagcgcccaggcgcagcaggatgggccctgcaccccaagacgctgcctgggctccctggtatttccacggaaactacagggccggccctcccccggccccccggcccctgagcagctgctgagtcaggcccgggacttcatcaaccagtactacagctccattaagaggagcggctcccaggcccacgaacagcggcttcaagaggtggaagccgaggtggcagccacaggcacctaccagcttagggagagcgagctggtgttcggggctaagcaggcctggcgcaacgctccccgctgcgtgggccggatccagtgggggaagctgcaggtgttcgatgcccgggactgcaggtctgcacaggaaatgttcacctacatctgcaaccacatcaagtatgccaccaaccggggcaaccttcgctcggccatcacagtgttcccgcagcgctgccctggccgaggagacttccgaatctggaacagccagctggtgcgctacgcgggctaccggcagcaggatggctctgtgcggggggacccagccaacgtggagatcaccgagctctgcattcagcacggctggaccccaggaaacggtcgcttcgacgtgctgcccctgctgctgcaggccccagatgatcccccagaactcttccttctgccccccgagctggtccttgaggtgcccctggagcaccccacgctggagtggtttgcagccctgggcctgcgctggtacgccctcccggcagtgtccaacatgctgctggaaattgggggcctggagttccccgcagcccccttcagtggctggtacatgagcactgagatcggcacgaggaacctgtgtgaccctcaccgctacaacatcctggaggatgtggctgtctgcatggacctggatacccggaccacctcgtccctgtggaaagacaaggcagcagtggaaatcaacgtggccgtgctgcacagttaccagctagccaaagtcaccatcgtggaccaccacgccgccacggcctctttcatgaagcacctggagaatgagcagaaggccagggggggctgccctgcagactgggcctggatcgtgccccccatctcgggcagcctcactcctgttttccatcaggagatggtcaactatttcctgtccccggccttccgctaccagccagacccctggaaggggagtgccgccaagggcaccggcatcaccaggaagaagacctttaaagaagtggccaacgccgtgaagatctccgcctcgctcatgggcacggtgatggcgaagcgagtgaaggcgacaatcctgtatggctccgagaccggccgggcccagagctacgcacagcagctggggagactcttccggaaggcttttgatccccgggtcctgtgtatggatgagtatgacgtggtgtccctcgaacacgagacgctggtgctggtggtaaccagcacatttgggaatggggatcccccggagaatggagagtctgtctccctgccagaagtgtctgtcaccacagaatagtttcgcctgctctagaacggcacctagatggaagcacgcagtgttgcggcgtctcctgctgaggctgtttttgaggcgcactcgtgttgctgcgtgactcagtatttcactcattctgctgctgagtgccgttcattgtgtgaatatccccagtttgtttacccattctcttgttggtgacacttgggctgtttccaggtcggggctattatgaataaacctgttatgaacattcttgtaaaaaaaaaa

SEQ ID NO: 99 - DNA, 12291 bp, Homo sapiens
ataaaagatgtatgctttggagcccagagcggctcttttaatgagggttgcgacgtctccctccccacacccataaaccagtcgggttggacgtcactgctaattcgtttcagtgatgataggataaaggagggacattaagaaataaattccccctcacgaccctcgctgagctcacggctcagtccctacatatttatgccgcgtttccagccgctgggtgaggagctacttagcgccgcggctcctccgaggggcggccgggcagcgagcagcggccgagcggacgggctcatgatgcctcagatctgatccgcatctaacaggctggcaatgaagatacccagagaatagttcacatctatcatgcgtcacttctagacacagccatcagacgcatctcctcccctttctgcctgaccttagggacacgtcccaccgcctctcttgacgtctgcctggtcaaccatcacttccttagagaataaggagagaggcggatgcaggaaatcatgccaccgacgggccaccagccatgagtgggtgacgctgagctgacgtcaaagacagagagggctgaagccttgtcagcacctgtcaccccggctcctgctctccgtgtagcctgaagcctggatcctcctggtgaaatcatcttggcctgatagcattgtgaggtcttcagacaggacccctcggaagctagttaccatggaggatcacatgttcggtgttcagcaaatccagcccaatgtcatttctgttcgtctcttcaagcgcaaagttgggggcctgggatttctggtgaaggagcgggtcagtaagccgcccgtgatcatctctgacctgattcgtgggggcgccgcagagcagagtggcctcatccaggccggagacatcattcttgcggtcaacggccggcccttggtggacctgagctatgacagcgccctggaggtactcagaggcattgcctctgagacccacgtggtcctcattctgaggggccctgaaggtttcaccacgcacctggagaccacctttacaggtgatgggacccccaagaccatccgggtgacacagcccctgggtccccccaccaaagccgtggatctgtcccaccagccaccggccggcaaagaacagcccctggcagtggatggggcctcgggtcccgggaatgggcctcagcatgcctacgatgatgggcaggaggctggctcactcccccatgccaacggcctggcccccaggcccccaggccaggaccccgcgaagaaagcaaccagagtcagcctccaaggcagaggggagaacaatgaactgctcaaggagatagagcctgtgctgagccttctcaccagtgggagcagaggggtcaagggaggggcacctgccaaggcagagatgaaagatatgggaatccaggtggacagagatttggacggcaagtcacacaaacctctgcccctcggcgtggagaacgaccgagtcttcaatgacctatgggggaagggcaatgtgcctgtcgtcctcaacaacccatattcagagaaggagcagccccccacctcaggaaaacagtcccccacaaagaatggcagcccctccaagtgtccacgcttcctcaaggtcaagaactgggagactgaggtggttctcactgacaccctccaccttaagagcacattggaaacgggatgcactgagtacatctgcatgggctccatcatgcatccttctcagcatgcaaggaggcctgaagacgtccgcacaaaaggacagctcttccctctcgccaaagagtttattgatcaatactattcatcaattaaaagatttggctccaaagcccacatggaaaggctggaagaggtgaacaaagagatcgacaccactagcacttaccagctcaaggacacagagctcatctatggggccaagcacgcctggcggaatgcctcgcgctgtgtgggcaggatccagtggtccaagctgcaggtattcgatgcccgtgactgcaccacggcccacgggatgttcaactacatctgtaaccatgtcaagtatgccaccaacaaagggaacctcaggtctgccatcaccatattcccccagaggacagacggcaagcacgacttccgagtctggaactcccagctcatccgctacgctggctacaagcagcctgacggctccaccctgggggacccagccaatgtgcagttcacagagatatgcatacagcagggctggaaaccgcctagaggccgcttcgatgtcctgccgctcctgcttcaggccaacggcaatgaccctgagctcttccagattcctccagagctggtgttggaagttcccatcaggcaccccaagtttgagtggttcaaggacctggggctgaagtggtacggcctccccgccgtgtccaacatgctcctagagattggcggcctggagttcagcgcctgtcccttcagtggctggtacatgggcacagagattggtgtccgcgactactgtgacaactcccgctacaatatcctggaggaagtggccaagaagatgaacttagacatgaggaagacgtcctccctgtggaaggaccaggcgctggtggagatcaatatcgcggttctctatagcttccagagtgacaaagtgaccattgttgaccatcactccgccaccgagtccttcattaagcacatggagaatgagtaccgctgccgggggggctgccctgccgactgggtgtggatcgtgccccccatgtccggaagcatcacccctgtgttccaccaggagatgctcaactaccggctcaccccctccttcgaataccagcctgatccctggaacacgcatgtctggaaaggcaccaacgggacccccacaaagcggcgagccattggcttcaagaagctagcagaagctgtcaagttctcggccaagctgatggggcaggctatggccaagagggtgaaagcgaccatcctctatgccacagagacaggcaaatcgcaagcttatgccaagaccttgtgtgagatcttcaaacacgcctttgatgccaaggtgatgtccatggaagaatatgacattgtgcacctggaacatgaaactctggtccttgtggtcaccagcacctttggcaatggagatccccctgagaatggggagaaattcggctgtgctttgatggaaatgaggcaccccaactctgtgcaggaagaaaggaagtacccggaacccttgcgtttctttccccgtaaagggcctcccctccccaatggtgacacagaagtccacggtctggctgcagcccgtgacagccagcacaggagctacaaggtccgattcaacagcgtctcctcctactctgactcccaaaaatcatcaggcgatgggcccgacctcagagacaactttgagagtgctggacccctggccaatgtgaggttctcagtttttggcctcggctcacgagcataccctcacttttgcgccttcggacacgctgtggacaccctcctggaagaactgggaggggagaggatcctgaagatgagggaaggggatgagctctgtgggcaggaagaggctttcaggacctgggccaagaaggtcttcaaggcagcctgtgatgtcttctgtgtgggagatgatgtcaacattgaaaaggccaacaattccctcatcagcaatgatcgcagctggaagagaaacaagttccgcctcacctttgtggccgaagctccagaactcacacaaggtctatccaatgtccacaaaaagcgagtctcagctgcccggctccttagccgtcaaaacctccagagccctaaatccagtcggtcaactatcttcgtgcgtctccacaccaacgggagccaggagctgcagtaccagcctggggaccacctgggtgtcttccctggcaaccacgaggacctcgtgaatgccctgatcgagcggctggaggacgcgccgcctgtcaaccagatggtgaaagtggaactgctggaggagcggaacacggctttaggtgtcatcagtaactggacagacgagctccgcctcccgccctgcaccatcttccaggccttcaagtactacctggacatcaccacgccaccaacgcctctgcagctgcagcagtttgcctccctagctaccagcgagaaggagaagcagcgtctgctggtcctcagcaagggtttgcaggagtacgaggaatggaaatggggcaagaaccccaccatcgtggaggtgctggaggagttcccatctatccagatgccggccaccctgctcctgacccagctgtccctgctgcagccccgctactattccatcagctcctccccagacatgtaccctgatgaagtgcacctcactgtggccatcgtttcctaccgcactcgagatggagaaggaccaattcaccacggcgtatgctcctcctggctcaaccggatacaggctgacgaactggtcccctgtttcgtgagaggagcacccagcttccacctgccccggaacccccaagtcccctgcatcctcgttggaccaggcaccggcattgcccctttccgaagcttctggcaacagcggcaatttgatatccaacacaaaggaatgaacccctgccccatggtcctggtcttcgggtgccggcaatccaagatagatcatatctacagggaagagaccctgcaggccaagaacaagggggtcttcagagagctgtacacggcttactcccgggagccagacaaaccaaagaagtacgtgcaggacatcctgcaggagcagctggcggagtctgtgtaccgagccctgaaggagcaagggggccacatatacgtctgtggggacgtcaccatggctgctgatgtcctcaaagccatccagcgcatcatgacccagcaggggaagctctcggcagaggacgccggcgtattcatcagccggatgagggatgacaaccgataccatgaggatatttttggagtcaccctgcgaacgtacgaagtgaccaaccgccttagatctgagtccattgccttcattgaagagagcaaaaaagacaccgatgaggttttcagctcctaactggaccctcttgcccagccggctgcaagttttgtaagcgcggacagacactgctgaacctttcctctgggaccccctgtggccctcgctctgcctcctgtccttgtcgctgtgccctggtttccctcctcgggcttctcgcccctcagtggtttcctcggccctcctgggtttactccttgagttttcctgctgcgatgcaatgcttttctaatctgcagtggctcttacaaaactctgttcccactccctctcttgccgacaagggcaactcacgggtgcatgaaaccactggaacatggccgtcgctgtgggggtttttttctctggggttcccctggaaaggctgcaggaactaggcacaagctctctgagccagtccctcagccactgaagtccccctttctccttttttatgatgacattttggttgtgcgtgcctgtgtgtgtgtgtgtgtgtgtgtgtgtgtgtgtgatgggccaggtctctgtccgtcctcttccctgcacaagtgtgtcgatcttagattgccactgctttcattgaagaccctcaatgccaagaaacgtgtccctggcccatattaatccctcgtgtgtccataattagggtccacgcccatgtacctgaaacatttggaagccccataattgttctagttagaaagggttcagggcatggggagaggagtgggaaattgattaaaggggctgtctcccaatgaaagaggcattcccagaatttgctgcatttagattttgataccagtgagcagagccctcatgtgacatgaacccatccaatggattgtgcaaatcccctccccaaacccacccataccagctagaatcacttgactttgccacatccattgactgaccccctcctccagcaatagcatccaaggggcctggaagttatgttgttcaaagaagcctggtggcaataaggatcttcccactttgccactggatgactttggatgggtcacttgtcctcagtttttcctagtcataatgtcatacgaacctaaagaatatgaatggattaaatgttaaagctttggtgcctggaaacaatatcaagtaacaatatgattattatttttttattcccccaaagcgggcttgctgcttcacccttggggatgaaataatggaagctggttaaagtggatgaggttggaaagagttgccataatgaggtcccacgtggcttcttcgataggagccacaacttggggtgggaagaacttgtccctcaggcttgttgccctctgcagttgatctccaaagttttaaacctgttaaattaattttgacaaataagttaccctcaactcagatcaaaaatgggcagccaagtcttcggtaggaattggagccggtgtaattcctccctaagaggcaacctgttgaatttactctctcagagtaaatggtgggaagggatccctttgtatacttttttaaatactacaaattagtgtcaggcagttcccagaaagagacaagaaatcctagtggcctcccagactgcagggtccccaaggatggaaagggaatgttctgctggttctaccctgtttgttgtgtcttgctatacagaaaaaccacatttcttttatatactgtacgtgggcatatcttgttgttcagtttgggtgtctgctaaagaggaagtgcactggccctctttgaaagggctttacagtgggggcaccaagaccccaaagggcccaggccaggagactgttaaagtgaaaaggcaatctatgactcaccttgctctgccatccctggcagcccccaccggtgtcctgttcctgccacatggagcttgacttcatgccagctataatctcccctgccttcctttaatcccaatttcccctgctcactcttccacagatataaagaacaaacacttagcatcccacactcaccccttctaatcctgaagggaagcccattctaaactcctttcctgcaaacccatttccagctcctagtagctttcctcccaaaggctttctttccaatcctttatagctttggagacgcctccccaattccccagggaaggaaactgttgtgtccaatccccattaaagacaaattgatcagtgcttcccactccaagtcaagctttatgcaggaatgcttttccatcagggaataaatacttagaagcgcttacaaggtgccaggcacctcctttctgcatgtgcctgcctttctagtagcagacagatggaaacattgtctcattttgtcaaggagtccaaagaaatgattataaaaccaggattcatccttcttctccagaaagatttttttttaagtaaacacctttcaatccccaacacaagctgcttcacaactccaggctagaaggcaggagagcgatctgatgtgtttctttcatttgccagaattcctgataccaaaagcctctctctctgttgagtaacctctcaaggaccagagtggagtccagattgttaggctcagatcaagggtggggaaatactgccctctcgtggtggcttttcatccaggcctcgtagccaaccgtttaagtgcaaaatagaattaagcaatgggtaagcaaaatagggttgacaagatatttgggggttattcgggttatggcccatttatttccctcttccccctgaattgaccagtagcagctccagccccatttcacaaaagtgagtttggccaggaggaatgagacgtctcctgaaataggaacaccggaacatcatgctcacctgccatcactatgcatccagttcccacagcttgtgtcgtgaaagagcagagagatgatgttaaactccttgggaggagagagggcttcttttggtttccctggagtgagacagccaggtgtctttcttttgcggggggacacttcagacccatcaatatggaattttgggagccgacctgagtgcaaatcctaattctgcccctgttggtgcagatggctgtgggcggctcacttgaccttttagagtctgcatacccacctgtataacaaggtggattgaatgagacaatgcccacgaaatgcccagttacagtacctggttcaaaacttactgcattttaatttttcacttaacttataacatgtcttgcttctccagtgtgtggaaggcaccgggcagtttgcagagataagcaaaacacagttcctctcgtgcagaaggttagaatctatttttttttttgacagagtcttgctctgtcacccaggctggcgtacagtggtacgatctcagctcactgcatcctctgcctcccccagttcaagtgattcttctgcctcggcctcctgagtaactgggactacaggcgcctaccaccacgcccagctaagttttgtatttttagtagagtcagggtttcaccatgttggccaggctggtcttgaattcctgacctcaaatgatccacgcacctcagcctcccaaagtgctggattacaggcatgagccaccacgcccagccaaaggttataatctgatggagagagacacccgtcttggaactgacataaatttctggggtttgagaaatgggcgggatttcactggtagcttctggaaggtaagagttgtccaggaattgggaagagtgagaggaaaggcacggacagggagcatgtaagataaattgaggctggctttggaaggctgaggagggtgagaaaaggtgggctgggaccagaccgtggggagaggtgagtggcattacaagaaatttaggctttattcagaaggcaacagggagtccctaagaatgtttttcaaaaagggacattaaggcgattggagttatacttggaaaagaaagttctggccacagtacagagcatggcccgttgagctgttgggggggttattgctgcaaccaaggcttgagtgagggaagaggcggatgtagtgataaagagactccaggaactgaatcagcgtacctggcaccccatccattgtagagggtgagaataaaggagaaattaaagcatcttgcaggctgggcgcggtagctcatgtctgtaatcccagcactttgggaggccgaggtgggtgtatcagttgaggtcaggagttggagaccagtcagccagttagtagaaaccctgactctactaagaaaatacaaaaattagctgggcatggtggcatgcgcctgtagtctcagctacctgggaggctgaggaaggaggatcgcttgagcccaggaggtggaggctgcagtgagccaagattgtaccactgcactccagcctgggtgacagagcaagactcttatctcaaaaaaaataaaataaaataaaataaaataaaacatcttgcccctagctgagagagaggtctctgaagagcaggctcagggaaaagatgagttttcagagctgatgtgatagtcagcttctctggagtcaacagggtgaatccttcccaagtccagccatgcccagatgcccggagggaaaactgacccccagccagtagacattggctaagaacacagaatcttctgaccaaacacgctttcagcagctgcctgctctggactttgaaagaggtcaggtcttgccctaagctcaaaacaagtgagaggtgtcctgacctagctcatagggcaaatggtcctaataggatgggcaatccagatgcctgagccccttcactccgacagcaccagcgcctaatgcagccttttcattcttgccattaggaaatctgtggacttctagcctgtgttttaaaccagccatgtttccttgtatatttccctacccgctgccccacatacccagcatgccgctgtggccaccatgtcctcaaagccttctgtctgtatcaggaatgtagtctgagactgccaggaagcaacaaggagagagaaacactaactagtcttcctttataacccattcatactctctggctgtccccaaccttcatagtctcctgcatccaaatgtcctctttggctcaaaaagtaggccaggcatggtggttcatgcctgtaatagcactttgggagactgaggtgggaggatcacttggggccaggagtttgagaccagcttgggcaacacagcgcaatctcgtctctactaaaaaaaaaaaaaaaaaaaaattagctgggcatgatggcatgctcctgtggtcccagctacttgggaggctgaggcaggaggatcacttggtcccaggagtttgaggcgacagtgagctaggatcgcaccactgcactccagcctgagtgacagagcaagaccctgtctctaaaaaaaattaaaatgaaagaccaggtgctgggattaaggaaacacaggtctgagggtctgagggaaggggcctgcctcccagggagtcaacatagatgttccccatgaacagggatttgactttggaggccaacctggcctggcctctgccctttatctcacactccctatccttggcccactgccagtccctgccttgtggcaaaggggccccaaaagaaaagctgcccttccccaaatgtaaggacccaggtacactttcacccgtggaaagcagtgtctgtcgagagtctgtttcctattaatacttatcaaagccatgtgcgagggaggtggtcagctgtcaatatgccttagtatgtttatatgagtttgttttgttctaaaatacccaaacagttctggtcaagcggggctatgcccgtctggcccaaaacacagtccgttattaacgagatggccctggcaggcgggaacaaatctgcctccatgcactgcttcctgtagtcttttagaaagtaactccaggacatcgaagtgcccagatttgactcctaagttctaggagactgtagcgcagggtctgtcaaccttagcactattggcatttggggctgggtaattctttcttgtgggggccgtcttgggtactgtaggaagctgagcagcattcctggcctccatccacaagatacctgtagcagtgtcctgccaacggtaacaatcaagtatgtcatcagacattgcccaatgtccccagggggcaacacccctctcttggacttcagggtcaagagaatctctgctggctaccccaggacttctcattatagatttcctggagcacgcagcagaaactttgcctagcccagtggttgtttccattatctgctgccaaagtgggatttgagggtgtccgggggagggggcatggggagggcagtatgctttcaaaaacccctcccaggccaggcgtggtggctcatgcctgtaatcacaggactttgggaggccgaggctggcagatcacttgaggctgggagttagagaccaacctggctaacatggcaaaacctcgtctctactaaaaatacaaaaatcagcccggcgtggtggcgggcatctgtaatcccatctactcgggaggctgaggcaggagaattacttgaacccaggaggcagaggctgcagtgagccgagatggcaccactgcactccagcttgttgacagaatgagaccctgtggaaaaaaaaaaaaaagccctcccatgccagaacagaggatggcagtctgtttcaataagacactgtgtccttggtgttggttctgattaagactcactgagatccagtgctcttgagctgggtctcagtcccctcccatgtcctgtgctctgccgccactgttttcattgttgtgttctcgttgtgattgttaagactcacactcctggctcagcagtggttttccagaaggcccaaagagcggtgccgggcaccccacgtcgcagtgtccgttccgggcttgggaagctggggaggtgggcagacctggtcgcatctcaccacacacacacacacacacacacacacacacgctgtcagaaactcggccgtcccccctacctctgagctctcaatgctgctaatctctgccaagtgtccctgtgctccagcaccttccttgaaggactgacgcccaccccacgctctttgcgaggttgtccaggctgtgtttgtcgcatgctcttcttctgtatagttctcatcttccaattttatgggattcaacaaaagcctattatgcttgtttgcattatggttacaatattaaaaagtggattcaaaaaaaa

SEQ ID NO: 100 - DNA, 12189 bp, Homo sapiens
ataaaagatgtatgctttggagcccagagcggctcttttaatgagggttgcgacgtctccctccccacacccataaaccagtcgggttggacgtcactgctaattcgtttcagtgatgataggataaaggagggacattaagaaataaattccccctcacgaccctcgctgagctcacggctcagtccctacatatttatgccgcgtttccagccgctgggtgaggagctacttagcgccgcggctcctccgaggggcggccgggcagcgagcagcggccgagcggacgggctcatgatgcctcagatctgatccgcatctaacaggctggcaatgaagatacccagagaatagttcacatctatcatgcgtcacttctagacacagccatcagacgcatctcctcccctttctgcctgaccttagggacacgtcccaccgcctctcttgacgtctgcctggtcaaccatcacttccttagagaataaggagagaggcggatgcaggaaatcatgccaccgacgggccaccagccatgagtgggtgacgctgagctgacgtcaaagacagagagggctgaagccttgtcagcacctgtcaccccggctcctgctctccgtgtagcctgaagcctggatcctcctggtgaaatcatcttggcctgatagcattgtgaggtcttcagacaggacccctcggaagctagttaccatggaggatcacatgttcggtgttcagcaaatccagcccaatgtcatttctgttcgtctcttcaagcgcaaagttgggggcctgggatttctggtgaaggagcgggtcagtaagccgcccgtgatcatctctgacctgattcgtgggggcgccgcagagcagagtggcctcatccaggccggagacatcattcttgcggtcaacggccggcccttggtggacctgagctatgacagcgccctggaggtactcagaggcattgcctctgagacccacgtggtcctcattctgaggggccctgaaggtttcaccacgcacctggagaccacctttacaggtgatgggacccccaagaccatccgggtgacacagcccctgggtccccccaccaaagccgtggatctgtcccaccagccaccggccggcaaagaacagcccctggcagtggatggggcctcgggtcccgggaatgggcctcagcatgcctacgatgatgggcaggaggctggctcactcccccatgccaacggcctggcccccaggcccccaggccaggaccccgcgaagaaagcaaccagagtcagcctccaaggcagaggggagaacaatgaactgctcaaggagatagagcctgtgctgagccttctcaccagtgggagcagaggggtcaagggaggggcacctgccaaggcagagatgaaagatatgggaatccaggtggacagagatttggacggcaagtcacacaaacctctgcccctcggcgtggagaacgaccgagtcttcaatgacctatgggggaagggcaatgtgcctgtcgtcctcaacaacccatattcagagaaggagcagccccccacctcaggaaaacagtcccccacaaagaatggcagcccctccaagtgtccacgcttcctcaaggtcaagaactgggagactgaggtggttctcactgacaccctccaccttaagagcacattggaaacgggatgcactgagtacatctgcatgggctccatcatgcatccttctcagcatgcaaggaggcctgaagacgtccgcacaaaaggacagctcttccctctcgccaaagagtttattgatcaatactattcatcaattaaaagatttggctccaaagcccacatggaaaggctggaagaggtgaacaaagagatcgacaccactagcacttaccagctcaaggacacagagctcatctatggggccaagcacgcctggcggaatgcctcgcgctgtgtgggcaggatccagtggtccaagctgcaggtattcgatgcccgtgactgcaccacggcccacgggatgttcaactacatctgtaaccatgtcaagtatgccaccaacaaagggaacctcaggtctgccatcaccatattcccccagaggacagacggcaagcacgacttccgagtctggaactcccagctcatccgctacgctggctacaagcagcctgacggctccaccctgggggacccagccaatgtgcagttcacagagatatgcatacagcagggctggaaaccgcctagaggccgcttcgatgtcctgccgctcctgcttcaggccaacggcaatgaccctgagctcttccagattcctccagagctggtgttggaagttcccatcaggcaccccaagtttgagtggttcaaggacctggggctgaagtggtacggcctccccgccgtgtccaacatgctcctagagattggcggcctggagttcagcgcctgtcccttcagtggctggtacatgggcacagagattggtgtccgcgactactgtgacaactcccgctacaatatcctggaggaagtggccaagaagatgaacttagacatgaggaagacgtcctccctgtggaaggaccaggcgctggtggagatcaatatcgcggttctctatagcttccagagtgacaaagtgaccattgttgaccatcactccgccaccgagtccttcattaagcacatggagaatgagtaccgctgccgggggggctgccctgccgactgggtgtggatcgtgccccccatgtccggaagcatcacccctgtgttccaccaggagatgctcaactaccggctcaccccctccttcgaataccagcctgatccctggaacacgcatgtctggaaaggcaccaacgggacccccacaaagcggcgagccattggcttcaagaagctagcagaagctgtcaagttctcggccaagctgatggggcaggctatggccaagagggtgaaagcgaccatcctctatgccacagagacaggcaaatcgcaagcttatgccaagaccttgtgtgagatcttcaaacacgcctttgatgccaaggtgatgtccatggaagaatatgacattgtgcacctggaacatgaaactctggtccttgtggtcaccagcacctttggcaatggagatccccctgagaatggggagaaattcggctgtgctttgatggaaatgaggcaccccaactctgtgcaggaagaaaggaagagctacaaggtccgattcaacagcgtctcctcctactctgactcccaaaaatcatcaggcgatgggcccgacctcagagacaactttgagagtgctggacccctggccaatgtgaggttctcagtttttggcctcggctcacgagcataccctcacttttgcgccttcggacacgctgtggacaccctcctggaagaactgggaggggagaggatcctgaagatgagggaaggggatgagctctgtgggcaggaagaggctttcaggacctgggccaagaaggtcttcaaggcagcctgtgatgtcttctgtgtgggagatgatgtcaacattgaaaaggccaacaattccctcatcagcaatgatcgcagctggaagagaaacaagttccgcctcacctttgtggccgaagctccagaactcacacaaggtctatccaatgtccacaaaaagcgagtctcagctgcccggctccttagccgtcaaaacctccagagccctaaatccagtcggtcaactatcttcgtgcgtctccacaccaacgggagccaggagctgcagtaccagcctggggaccacctgggtgtcttccctggcaaccacgaggacctcgtgaatgccctgatcgagcggctggaggacgcgccgcctgtcaaccagatggtgaaagtggaactgctggaggagcggaacacggctttaggtgtcatcagtaactggacagacgagctccgcctcccgccctgcaccatcttccaggccttcaagtactacctggacatcaccacgccaccaacgcctctgcagctgcagcagtttgcctccctagctaccagcgagaaggagaagcagcgtctgctggtcctcagcaagggtttgcaggagtacgaggaatggaaatggggcaagaaccccaccatcgtggaggtgctggaggagttcccatctatccagatgccggccaccctgctcctgacccagctgtccctgctgcagccccgctactattccatcagctcctccccagacatgtaccctgatgaagtgcacctcactgtggccatcgtttcctaccgcactcgagatggagaaggaccaattcaccacggcgtatgctcctcctggctcaaccggatacaggctgacgaactggtcccctgtttcgtgagaggagcacccagcttccacctgccccggaacccccaagtcccctgcatcctcgttggaccaggcaccggcattgcccctttccgaagcttctggcaacagcggcaatttgatatccaacacaaaggaatgaacccctgccccatggtcctggtcttcgggtgccggcaatccaagatagatcatatctacagggaagagaccctgcaggccaagaacaagggggtcttcagagagctgtacacggcttactcccgggagccagacaaaccaaagaagtacgtgcaggacatcctgcaggagcagctggcggagtctgtgtaccgagccctgaaggagcaagggggccacatatacgtctgtggggacgtcaccatggctgctgatgtcctcaaagccatccagcgcatcatgacccagcaggggaagctctcggcagaggacgccggcgtattcatcagccggatgagggatgacaaccgataccatgaggatatttttggagtcaccctgcgaacgtacgaagtgaccaaccgccttagatctgagtccattgccttcattgaagagagcaaaaaagacaccgatgaggttttcagctcctaactggaccctcttgcccagccggctgcaagttttgtaagcgcggacagacactgctgaacctttcctctgggaccccctgtggccctcgctctgcctcctgtccttgtcgctgtgccctggtttccctcctcgggcttctcgcccctcagtggtttcctcggccctcctgggtttactccttgagttttcctgctgcgatgcaatgcttttctaatctgcagtggctcttacaaaactctgttcccactccctctcttgccgacaagggcaactcacgggtgcatgaaaccactggaacatggccgtcgctgtgggggtttttttctctggggttcccctggaaaggctgcaggaactaggcacaagctctctgagccagtccctcagccactgaagtccccctttctccttttttatgatgacattttggttgtgcgtgcctgtgtgtgtgtgtgtgtgtgtgtgtgtgtgtgtgatgggccaggtctctgtccgtcctcttccctgcacaagtgtgtcgatcttagattgccactgctttcattgaagaccctcaatgccaagaaacgtgtccctggcccatattaatccctcgtgtgtccataattagggtccacgcccatgtacctgaaacatttggaagccccataattgttctagttagaaagggttcagggcatggggagaggagtgggaaattgattaaaggggctgtctcccaatgaaagaggcattcccagaatttgctgcatttagattttgataccagtgagcagagccctcatgtgacatgaacccatccaatggattgtgcaaatcccctccccaaacccacccataccagctagaatcacttgactttgccacatccattgactgaccccctcctccagcaatagcatccaaggggcctggaagttatgttgttcaaagaagcctggtggcaataaggatcttcccactttgccactggatgactttggatgggtcacttgtcctcagtttttcctagtcataatgtcatacgaacctaaagaatatgaatggattaaatgttaaagctttggtgcctggaaacaatatcaagtaacaatatgattattatttttttattcccccaaagcgggcttgctgcttcacccttggggatgaaataatggaagctggttaaagtggatgaggttggaaagagttgccataatgaggtcccacgtggcttcttcgataggagccacaacttggggtgggaagaacttgtccctcaggcttgttgccctctgcagttgatctccaaagttttaaacctgttaaattaattttgacaaataagttaccctcaactcagatcaaaaatgggcagccaagtcttcggtaggaattggagccggtgtaattcctccctaagaggcaacctgttgaatttactctctcagagtaaatggtgggaagggatccctttgtatacttttttaaatactacaaattagtgtcaggcagttcccagaaagagacaagaaatcctagtggcctcccagactgcagggtccccaaggatggaaagggaatgttctgctggttctaccctgtttgttgtgtcttgctatacagaaaaaccacatttcttttatatactgtacgtgggcatatcttgttgttcagtttgggtgtctgctaaagaggaagtgcactggccctctttgaaagggctttacagtgggggcaccaagaccccaaagggcccaggccaggagactgttaaagtgaaaaggcaatctatgactcaccttgctctgccatccctggcagcccccaccggtgtcctgttcctgccacatggagcttgacttcatgccagctataatctcccctgccttcctttaatcccaatttcccctgctcactcttccacagatataaagaacaaacacttagcatcccacactcaccccttctaatcctgaagggaagcccattctaaactcctttcctgcaaacccatttccagctcctagtagctttcctcccaaaggctttctttccaatcctttatagctttggagacgcctccccaattccccagggaaggaaactgttgtgtccaatccccattaaagacaaattgatcagtgcttcccactccaagtcaagctttatgcaggaatgcttttccatcagggaataaatacttagaagcgcttacaaggtgccaggcacctcctttctgcatgtgcctgcctttctagtagcagacagatggaaacattgtctcattttgtcaaggagtccaaagaaatgattataaaaccaggattcatccttcttctccagaaagatttttttttaagtaaacacctttcaatccccaacacaagctgcttcacaactccaggctagaaggcaggagagcgatctgatgtgtttctttcatttgccagaattcctgataccaaaagcctctctctctgttgagtaacctctcaaggaccagagtggagtccagattgttaggctcagatcaagggtggggaaatactgccctctcgtggtggcttttcatccaggcctcgtagccaaccgtttaagtgcaaaatagaattaagcaatgggtaagcaaaatagggttgacaagatatttgggggttattcgggttatggcccatttatttccctcttccccctgaattgaccagtagcagctccagccccatttcacaaaagtgagtttggccaggaggaatgagacgtctcctgaaataggaacaccggaacatcatgctcacctgccatcactatgcatccagttcccacagcttgtgtcgtgaaagagcagagagatgatgttaaactccttgggaggagagagggcttcttttggtttccctggagtgagacagccaggtgtctttcttttgcggggggacacttcagacccatcaatatggaattttgggagccgacctgagtgcaaatcctaattctgcccctgttggtgcagatggctgtgggcggctcacttgaccttttagagtctgcatacccacctgtataacaaggtggattgaatgagacaatgcccacgaaatgcccagttacagtacctggttcaaaacttactgcattttaatttttcacttaacttataacatgtcttgcttctccagtgtgtggaaggcaccgggcagtttgcagagataagcaaaacacagttcctctcgtgcagaaggttagaatctatttttttttttgacagagtcttgctctgtcacccaggctggcgtacagtggtacgatctcagctcactgcatcctctgcctcccccagttcaagtgattcttctgcctcggcctcctgagtaactgggactacaggcgcctaccaccacgcccagctaagttttgtatttttagtagagtcagggtttcaccatgttggccaggctggtcttgaattcctgacctcaaatgatccacgcacctcagcctcccaaagtgctggattacaggcatgagccaccacgcccagccaaaggttataatctgatggagagagacacccgtcttggaactgacataaatttctggggtttgagaaatgggcgggatttcactggtagcttctggaaggtaagagttgtccaggaattgggaagagtgagaggaaaggcacggacagggagcatgtaagataaattgaggctggctttggaaggctgaggagggtgagaaaaggtgggctgggaccagaccgtggggagaggtgagtggcattacaagaaatttaggctttattcagaaggcaacagggagtccctaagaatgtttttcaaaaagggacattaaggcgattggagttatacttggaaaagaaagttctggccacagtacagagcatggcccgttgagctgttgggggggttattgctgcaaccaaggcttgagtgagggaagaggcggatgtagtgataaagagactccaggaactgaatcagcgtacctggcaccccatccattgtagagggtgagaataaaggagaaattaaagcatcttgcaggctgggcgcggtagctcatgtctgtaatcccagcactttgggaggccgaggtgggtgtatcagttgaggtcaggagttggagaccagtcagccagttagtagaaaccctgactctactaagaaaatacaaaaattagctgggcatggtggcatgcgcctgtagtctcagctacctgggaggctgaggaaggaggatcgcttgagcccaggaggtggaggctgcagtgagccaagattgtaccactgcactccagcctgggtgacagagcaagactcttatctcaaaaaaaataaaataaaataaaataaaataaaacatcttgcccctagctgagagagaggtctctgaagagcaggctcagggaaaagatgagttttcagagctgatgtgatagtcagcttctctggagtcaacagggtgaatccttcccaagtccagccatgcccagatgcccggagggaaaactgacccccagccagtagacattggctaagaacacagaatcttctgaccaaacacgctttcagcagctgcctgctctggactttgaaagaggtcaggtcttgccctaagctcaaaacaagtgagaggtgtcctgacctagctcatagggcaaatggtcctaataggatgggcaatccagatgcctgagccccttcactccgacagcaccagcgcctaatgcagccttttcattcttgccattaggaaatctgtggacttctagcctgtgttttaaaccagccatgtttccttgtatatttccctacccgctgccccacatacccagcatgccgctgtggccaccatgtcctcaaagccttctgtctgtatcaggaatgtagtctgagactgccaggaagcaacaaggagagagaaacactaactagtcttcctttataacccattcatactctctggctgtccccaaccttcatagtctcctgcatccaaatgtcctctttggctcaaaaagtaggccaggcatggtggttcatgcctgtaatagcactttgggagactgaggtgggaggatcacttggggccaggagtttgagaccagcttgggcaacacagcgcaatctcgtctctactaaaaaaaaaaaaaaaaaaaaattagctgggcatgatggcatgctcctgtggtcccagctacttgggaggctgaggcaggaggatcacttggtcccaggagtttgaggcgacagtgagctaggatcgcaccactgcactccagcctgagtgacagagcaagaccctgtctctaaaaaaaattaaaatgaaagaccaggtgctgggattaaggaaacacaggtctgagggtctgagggaaggggcctgcctcccagggagtcaacatagatgttccccatgaacagggatttgactttggaggccaacctggcctggcctctgccctttatctcacactccctatccttggcccactgccagtccctgccttgtggcaaaggggccccaaaagaaaagctgcccttccccaaatgtaaggacccaggtacactttcacccgtggaaagcagtgtctgtcgagagtctgtttcctattaatacttatcaaagccatgtgcgagggaggtggtcagctgtcaatatgccttagtatgtttatatgagtttgttttgttctaaaatacccaaacagttctggtcaagcggggctatgcccgtctggcccaaaacacagtccgttattaacgagatggccctggcaggcgggaacaaatctgcctccatgcactgcttcctgtagtcttttagaaagtaactccaggacatcgaagtgcccagatttgactcctaagttctaggagactgtagcgcagggtctgtcaaccttagcactattggcatttggggctgggtaattctttcttgtgggggccgtcttgggtactgtaggaagctgagcagcattcctggcctccatccacaagatacctgtagcagtgtcctgccaacggtaacaatcaagtatgtcatcagacattgcccaatgtccccagggggcaacacccctctcttggacttcagggtcaagagaatctctgctggctaccccaggacttctcattatagatttcctggagcacgcagcagaaactttgcctagcccagtggttgtttccattatctgctgccaaagtgggatttgagggtgtccgggggagggggcatggggagggcagtatgctttcaaaaacccctcccaggccaggcgtggtggctcatgcctgtaatcacaggactttgggaggccgaggctggcagatcacttgaggctgggagttagagaccaacctggctaacatggcaaaacctcgtctctactaaaaatacaaaaatcagcccggcgtggtggcgggcatctgtaatcccatctactcgggaggctgaggcaggagaattacttgaacccaggaggcagaggctgcagtgagccgagatggcaccactgcactccagcttgttgacagaatgagaccctgtggaaaaaaaaaaaaaagccctcccatgccagaacagaggatggcagtctgtttcaataagacactgtgtccttggtgttggttctgattaagactcactgagatccagtgctcttgagctgggtctcagtcccctcccatgtcctgtgctctgccgccactgttttcattgttgtgttctcgttgtgattgttaagactcacactcctggctcagcagtggttttccagaaggcccaaagagcggtgccgggcaccccacgtcgcagtgtccgttccgggcttgggaagctggggaggtgggcagacctggtcgcatctcaccacacacacacacacacacacacacacacacgctgtcagaaactcggccgtcccccctacctctgagctctcaatgctgctaatctctgccaagtgtccctgtgctccagcaccttccttgaaggactgacgcccaccccacgctctttgcgaggttgtccaggctgtgtttgtcgcatgctcttcttctgtatagttctcatcttccaattttatgggattcaacaaaagcctattatgcttgtttgcattatggttacaatattaaaaagtggattcaaaaaaaa

SEQ ID NO: 101 - DNA, 10776 bp, Homo sapiens
cggggaggatgagacattctagagccttggtggtaactgctttccttagccgctgatggctggccaggaagataaggacatcagggattctgtgatgaggaaactgagaatcacagagggttttggtgctcaacgagggtcacataaccaccccccacctcaggaaaacagtcccccacaaagaatggcagcccctccaagtgtccacgcttcctcaaggtcaagaactgggagactgaggtggttctcactgacaccctccaccttaagagcacattggaaacgggatgcactgagtacatctgcatgggctccatcatgcatccttctcagcatgcaaggaggcctgaagacgtccgcacaaaaggacagctcttccctctcgccaaagagtttattgatcaatactattcatcaattaaaagatttggctccaaagcccacatggaaaggctggaagaggtgaacaaagagatcgacaccactagcacttaccagctcaaggacacagagctcatctatggggccaagcacgcctggcggaatgcctcgcgctgtgtgggcaggatccagtggtccaagctgcaggtattcgatgcccgtgactgcaccacggcccacgggatgttcaactacatctgtaaccatgtcaagtatgccaccaacaaagggaacctcaggtctgccatcaccatattcccccagaggacagacggcaagcacgacttccgagtctggaactcccagctcatccgctacgctggctacaagcagcctgacggctccaccctgggggacccagccaatgtgcagttcacagagatatgcatacagcagggctggaaaccgcctagaggccgcttcgatgtcctgccgctcctgcttcaggccaacggcaatgaccctgagctcttccagattcctccagagctggtgttggaagttcccatcaggcaccccaagtttgagtggttcaaggacctggggctgaagtggtacggcctccccgccgtgtccaacatgctcctagagattggcggcctggagttcagcgcctgtcccttcagtggctggtacatgggcacagagattggtgtccgcgactactgtgacaactcccgctacaatatcctggaggaagtggccaagaagatgaacttagacatgaggaagacgtcctccctgtggaaggaccaggcgctggtggagatcaatatcgcggttctctatagcttccagagtgacaaagtgaccattgttgaccatcactccgccaccgagtccttcattaagcacatggagaatgagtaccgctgccgggggggctgccctgccgactgggtgtggatcgtgccccccatgtccggaagcatcacccctgtgttccaccaggagatgctcaactaccggctcaccccctccttcgaataccagcctgatccctggaacacgcatgtctggaaaggcaccaacgggacccccacaaagcggcgagccattggcttcaagaagctagcagaagctgtcaagttctcggccaagctgatggggcaggctatggccaagagggtgaaagcgaccatcctctatgccacagagacaggcaaatcgcaagcttatgccaagaccttgtgtgagatcttcaaacacgcctttgatgccaaggtgatgtccatggaagaatatgacattgtgcacctggaacatgaaactctggtccttgtggtcaccagcacctttggcaatggagatccccctgagaatggggagaaattcggctgtgctttgatggaaatgaggcaccccaactctgtgcaggaagaaaggaagagctacaaggtccgattcaacagcgtctcctcctactctgactcccaaaaatcatcaggcgatgggcccgacctcagagacaactttgagagtgctggacccctggccaatgtgaggttctcagtttttggcctcggctcacgagcataccctcacttttgcgccttcggacacgctgtggacaccctcctggaagaactgggaggggagaggatcctgaagatgagggaaggggatgagctctgtgggcaggaagaggctttcaggacctgggccaagaaggtcttcaaggcagcctgtgatgtcttctgtgtgggagatgatgtcaacattgaaaaggccaacaattccctcatcagcaatgatcgcagctggaagagaaacaagttccgcctcacctttgtggccgaagctccagaactcacacaaggtctatccaatgtccacaaaaagcgagtctcagctgcccggctccttagccgtcaaaacctccagagccctaaatccagtcggtcaactatcttcgtgcgtctccacaccaacgggagccaggagctgcagtaccagcctggggaccacctgggtgtcttccctggcaaccacgaggacctcgtgaatgccctgatcgagcggctggaggacgcgccgcctgtcaaccagatggtgaaagtggaactgctggaggagcggaacacggctttaggtgtcatcagtaactggacagacgagctccgcctcccgccctgcaccatcttccaggccttcaagtactacctggacatcaccacgccaccaacgcctctgcagctgcagcagtttgcctccctagctaccagcgagaaggagaagcagcgtctgctggtcctcagcaagggtttgcaggagtacgaggaatggaaatggggcaagaaccccaccatcgtggaggtgctggaggagttcccatctatccagatgccggccaccctgctcctgacccagctgtccctgctgcagccccgctactattccatcagctcctccccagacatgtaccctgatgaagtgcacctcactgtggccatcgtttcctaccgcactcgagatggagaaggaccaattcaccacggcgtatgctcctcctggctcaaccggatacaggctgacgaactggtcccctgtttcgtgagaggagcacccagcttccacctgccccggaacccccaagtcccctgcatcctcgttggaccaggcaccggcattgcccctttccgaagcttctggcaacagcggcaatttgatatccaacacaaaggaatgaacccctgccccatggtcctggtcttcgggtgccggcaatccaagatagatcatatctacagggaagagaccctgcaggccaagaacaagggggtcttcagagagctgtacacggcttactcccgggagccagacaaaccaaagaagtacgtgcaggacatcctgcaggagcagctggcggagtctgtgtaccgagccctgaaggagcaagggggccacatatacgtctgtggggacgtcaccatggctgctgatgtcctcaaagccatccagcgcatcatgacccagcaggggaagctctcggcagaggacgccggcgtattcatcagccggatgagggatgacaaccgataccatgaggatatttttggagtcaccctgcgaacgtacgaagtgaccaaccgccttagatctgagtccattgccttcattgaagagagcaaaaaagacaccgatgaggttttcagctcctaactggaccctcttgcccagccggctgcaagttttgtaagcgcggacagacactgctgaacctttcctctgggaccccctgtggccctcgctctgcctcctgtccttgtcgctgtgccctggtttccctcctcgggcttctcgcccctcagtggtttcctcggccctcctgggtttactccttgagttttcctgctgcgatgcaatgcttttctaatctgcagtggctcttacaaaactctgttcccactccctctcttgccgacaagggcaactcacgggtgcatgaaaccactggaacatggccgtcgctgtgggggtttttttctctggggttcccctggaaaggctgcaggaactaggcacaagctctctgagccagtccctcagccactgaagtccccctttctccttttttatgatgacattttggttgtgcgtgcctgtgtgtgtgtgtgtgtgtgtgtgtgtgtgtgtgatgggccaggtctctgtccgtcctcttccctgcacaagtgtgtcgatcttagattgccactgctttcattgaagaccctcaatgccaagaaacgtgtccctggcccatattaatccctcgtgtgtccataattagggtccacgcccatgtacctgaaacatttggaagccccataattgttctagttagaaagggttcagggcatggggagaggagtgggaaattgattaaaggggctgtctcccaatgaaagaggcattcccagaatttgctgcatttagattttgataccagtgagcagagccctcatgtgacatgaacccatccaatggattgtgcaaatcccctccccaaacccacccataccagctagaatcacttgactttgccacatccattgactgaccccctcctccagcaatagcatccaaggggcctggaagttatgttgttcaaagaagcctggtggcaataaggatcttcccactttgccactggatgactttggatgggtcacttgtcctcagtttttcctagtcataatgtcatacgaacctaaagaatatgaatggattaaatgttaaagctttggtgcctggaaacaatatcaagtaacaatatgattattatttttttattcccccaaagcgggcttgctgcttcacccttggggatgaaataatggaagctggttaaagtggatgaggttggaaagagttgccataatgaggtcccacgtggcttcttcgataggagccacaacttggggtgggaagaacttgtccctcaggcttgttgccctctgcagttgatctccaaagttttaaacctgttaaattaattttgacaaataagttaccctcaactcagatcaaaaatgggcagccaagtcttcggtaggaattggagccggtgtaattcctccctaagaggcaacctgttgaatttactctctcagagtaaatggtgggaagggatccctttgtatacttttttaaatactacaaattagtgtcaggcagttcccagaaagagacaagaaatcctagtggcctcccagactgcagggtccccaaggatggaaagggaatgttctgctggttctaccctgtttgttgtgtcttgctatacagaaaaaccacatttcttttatatactgtacgtgggcatatcttgttgttcagtttgggtgtctgctaaagaggaagtgcactggccctctttgaaagggctttacagtgggggcaccaagaccccaaagggcccaggccaggagactgttaaagtgaaaaggcaatctatgactcaccttgctctgccatccctggcagcccccaccggtgtcctgttcctgccacatggagcttgacttcatgccagctataatctcccctgccttcctttaatcccaatttcccctgctcactcttccacagatataaagaacaaacacttagcatcccacactcaccccttctaatcctgaagggaagcccattctaaactcctttcctgcaaacccatttccagctcctagtagctttcctcccaaaggctttctttccaatcctttatagctttggagacgcctccccaattccccagggaaggaaactgttgtgtccaatccccattaaagacaaattgatcagtgcttcccactccaagtcaagctttatgcaggaatgcttttccatcagggaataaatacttagaagcgcttacaaggtgccaggcacctcctttctgcatgtgcctgcctttctagtagcagacagatggaaacattgtctcattttgtcaaggagtccaaagaaatgattataaaaccaggattcatccttcttctccagaaagatttttttttaagtaaacacctttcaatccccaacacaagctgcttcacaactccaggctagaaggcaggagagcgatctgatgtgtttctttcatttgccagaattcctgataccaaaagcctctctctctgttgagtaacctctcaaggaccagagtggagtccagattgttaggctcagatcaagggtggggaaatactgccctctcgtggtggcttttcatccaggcctcgtagccaaccgtttaagtgcaaaatagaattaagcaatgggtaagcaaaatagggttgacaagatatttgggggttattcgggttatggcccatttatttccctcttccccctgaattgaccagtagcagctccagccccatttcacaaaagtgagtttggccaggaggaatgagacgtctcctgaaataggaacaccggaacatcatgctcacctgccatcactatgcatccagttcccacagcttgtgtcgtgaaagagcagagagatgatgttaaactccttgggaggagagagggcttcttttggtttccctggagtgagacagccaggtgtctttcttttgcggggggacacttcagacccatcaatatggaattttgggagccgacctgagtgcaaatcctaattctgcccctgttggtgcagatggctgtgggcggctcacttgaccttttagagtctgcatacccacctgtataacaaggtggattgaatgagacaatgcccacgaaatgcccagttacagtacctggttcaaaacttactgcattttaatttttcacttaacttataacatgtcttgcttctccagtgtgtggaaggcaccgggcagtttgcagagataagcaaaacacagttcctctcgtgcagaaggttagaatctatttttttttttgacagagtcttgctctgtcacccaggctggcgtacagtggtacgatctcagctcactgcatcctctgcctcccccagttcaagtgattcttctgcctcggcctcctgagtaactgggactacaggcgcctaccaccacgcccagctaagttttgtatttttagtagagtcagggtttcaccatgttggccaggctggtcttgaattcctgacctcaaatgatccacgcacctcagcctcccaaagtgctggattacaggcatgagccaccacgcccagccaaaggttataatctgatggagagagacacccgtcttggaactgacataaatttctggggtttgagaaatgggcgggatttcactggtagcttctggaaggtaagagttgtccaggaattgggaagagtgagaggaaaggcacggacagggagcatgtaagataaattgaggctggctttggaaggctgaggagggtgagaaaaggtgggctgggaccagaccgtggggagaggtgagtggcattacaagaaatttaggctttattcagaaggcaacagggagtccctaagaatgtttttcaaaaagggacattaaggcgattggagttatacttggaaaagaaagttctggccacagtacagagcatggcccgttgagctgttgggggggttattgctgcaaccaaggcttgagtgagggaagaggcggatgtagtgataaagagactccaggaactgaatcagcgtacctggcaccccatccattgtagagggtgagaataaaggagaaattaaagcatcttgcaggctgggcgcggtagctcatgtctgtaatcccagcactttgggaggccgaggtgggtgtatcagttgaggtcaggagttggagaccagtcagccagttagtagaaaccctgactctactaagaaaatacaaaaattagctgggcatggtggcatgcgcctgtagtctcagctacctgggaggctgaggaaggaggatcgcttgagcccaggaggtggaggctgcagtgagccaagattgtaccactgcactccagcctgggtgacagagcaagactcttatctcaaaaaaaataaaataaaataaaataaaataaaacatcttgcccctagctgagagagaggtctctgaagagcaggctcagggaaaagatgagttttcagagctgatgtgatagtcagcttctctggagtcaacagggtgaatccttcccaagtccagccatgcccagatgcccggagggaaaactgacccccagccagtagacattggctaagaacacagaatcttctgaccaaacacgctttcagcagctgcctgctctggactttgaaagaggtcaggtcttgccctaagctcaaaacaagtgagaggtgtcctgacctagctcatagggcaaatggtcctaataggatgggcaatccagatgcctgagccccttcactccgacagcaccagcgcctaatgcagccttttcattcttgccattaggaaatctgtggacttctagcctgtgttttaaaccagccatgtttccttgtatatttccctacccgctgccccacatacccagcatgccgctgtggccaccatgtcctcaaagccttctgtctgtatcaggaatgtagtctgagactgccaggaagcaacaaggagagagaaacactaactagtcttcctttataacccattcatactctctggctgtccccaaccttcatagtctcctgcatccaaatgtcctctttggctcaaaaagtaggccaggcatggtggttcatgcctgtaatagcactttgggagactgaggtgggaggatcacttggggccaggagtttgagaccagcttgggcaacacagcgcaatctcgtctctactaaaaaaaaaaaaaaaaaaaaattagctgggcatgatggcatgctcctgtggtcccagctacttgggaggctgaggcaggaggatcacttggtcccaggagtttgaggcgacagtgagctaggatcgcaccactgcactccagcctgagtgacagagcaagaccctgtctctaaaaaaaattaaaatgaaagaccaggtgctgggattaaggaaacacaggtctgagggtctgagggaaggggcctgcctcccagggagtcaacatagatgttccccatgaacagggatttgactttggaggccaacctggcctggcctctgccctttatctcacactccctatccttggcccactgccagtccctgccttgtggcaaaggggccccaaaagaaaagctgcccttccccaaatgtaaggacccaggtacactttcacccgtggaaagcagtgtctgtcgagagtctgtttcctattaatacttatcaaagccatgtgcgagggaggtggtcagctgtcaatatgccttagtatgtttatatgagtttgttttgttctaaaatacccaaacagttctggtcaagcggggctatgcccgtctggcccaaaacacagtccgttattaacgagatggccctggcaggcgggaacaaatctgcctccatgcactgcttcctgtagtcttttagaaagtaactccaggacatcgaagtgcccagatttgactcctaagttctaggagactgtagcgcagggtctgtcaaccttagcactattggcatttggggctgggtaattctttcttgtgggggccgtcttgggtactgtaggaagctgagcagcattcctggcctccatccacaagatacctgtagcagtgtcctgccaacggtaacaatcaagtatgtcatcagacattgcccaatgtccccagggggcaacacccctctcttggacttcagggtcaagagaatctctgctggctaccccaggacttctcattatagatttcctggagcacgcagcagaaactttgcctagcccagtggttgtttccattatctgctgccaaagtgggatttgagggtgtccgggggagggggcatggggagggcagtatgctttcaaaaacccctcccaggccaggcgtggtggctcatgcctgtaatcacaggactttgggaggccgaggctggcagatcacttgaggctgggagttagagaccaacctggctaacatggcaaaacctcgtctctactaaaaatacaaaaatcagcccggcgtggtggcgggcatctgtaatcccatctactcgggaggctgaggcaggagaattacttgaacccaggaggcagaggctgcagtgagccgagatggcaccactgcactccagcttgttgacagaatgagaccctgtggaaaaaaaaaaaaaagccctcccatgccagaacagaggatggcagtctgtttcaataagacactgtgtccttggtgttggttctgattaagactcactgagatccagtgctcttgagctgggtctcagtcccctcccatgtcctgtgctctgccgccactgttttcattgttgtgttctcgttgtgattgttaagactcacactcctggctcagcagtggttttccagaaggcccaaagagcggtgccgggcaccccacgtcgcagtgtccgttccgggcttgggaagctggggaggtgggcagacctggtcgcatctcaccacacacacacacacacacacacacacacacgctgtcagaaactcggccgtcccccctacctctgagctctcaatgctgctaatctctgccaagtgtccctgtgctccagcaccttccttgaaggactgacgcccaccccacgctctttgcgaggttgtccaggctgtgtttgtcgcatgctcttcttctgtatagttctcatcttccaattttatgggattcaacaaaagcctattatgcttgtttgcattatggttacaatattaaaaagtggattcaaaaaaaa

SEQ ID NO: 102 - DNA, 10781 bp, Homo sapiens
gataggtgggggttgagaaatggctgggcagggcagcaaagcaactgccaaggactgggcaaaaggcaatagaatgcaattgaagcaggacgaatgcagatgaggaaactgagaatcacagagggttttggtgctcaacgagggtcacataaccaccccccacctcaggaaaacagtcccccacaaagaatggcagcccctccaagtgtccacgcttcctcaaggtcaagaactgggagactgaggtggttctcactgacaccctccaccttaagagcacattggaaacgggatgcactgagtacatctgcatgggctccatcatgcatccttctcagcatgcaaggaggcctgaagacgtccgcacaaaaggacagctcttccctctcgccaaagagtttattgatcaatactattcatcaattaaaagatttggctccaaagcccacatggaaaggctggaagaggtgaacaaagagatcgacaccactagcacttaccagctcaaggacacagagctcatctatggggccaagcacgcctggcggaatgcctcgcgctgtgtgggcaggatccagtggtccaagctgcaggtattcgatgcccgtgactgcaccacggcccacgggatgttcaactacatctgtaaccatgtcaagtatgccaccaacaaagggaacctcaggtctgccatcaccatattcccccagaggacagacggcaagcacgacttccgagtctggaactcccagctcatccgctacgctggctacaagcagcctgacggctccaccctgggggacccagccaatgtgcagttcacagagatatgcatacagcagggctggaaaccgcctagaggccgcttcgatgtcctgccgctcctgcttcaggccaacggcaatgaccctgagctcttccagattcctccagagctggtgttggaagttcccatcaggcaccccaagtttgagtggttcaaggacctggggctgaagtggtacggcctccccgccgtgtccaacatgctcctagagattggcggcctggagttcagcgcctgtcccttcagtggctggtacatgggcacagagattggtgtccgcgactactgtgacaactcccgctacaatatcctggaggaagtggccaagaagatgaacttagacatgaggaagacgtcctccctgtggaaggaccaggcgctggtggagatcaatatcgcggttctctatagcttccagagtgacaaagtgaccattgttgaccatcactccgccaccgagtccttcattaagcacatggagaatgagtaccgctgccgggggggctgccctgccgactgggtgtggatcgtgccccccatgtccggaagcatcacccctgtgttccaccaggagatgctcaactaccggctcaccccctccttcgaataccagcctgatccctggaacacgcatgtctggaaaggcaccaacgggacccccacaaagcggcgagccattggcttcaagaagctagcagaagctgtcaagttctcggccaagctgatggggcaggctatggccaagagggtgaaagcgaccatcctctatgccacagagacaggcaaatcgcaagcttatgccaagaccttgtgtgagatcttcaaacacgcctttgatgccaaggtgatgtccatggaagaatatgacattgtgcacctggaacatgaaactctggtccttgtggtcaccagcacctttggcaatggagatccccctgagaatggggagaaattcggctgtgctttgatggaaatgaggcaccccaactctgtgcaggaagaaaggaagagctacaaggtccgattcaacagcgtctcctcctactctgactcccaaaaatcatcaggcgatgggcccgacctcagagacaactttgagagtgctggacccctggccaatgtgaggttctcagtttttggcctcggctcacgagcataccctcacttttgcgccttcggacacgctgtggacaccctcctggaagaactgggaggggagaggatcctgaagatgagggaaggggatgagctctgtgggcaggaagaggctttcaggacctgggccaagaaggtcttcaaggcagcctgtgatgtcttctgtgtgggagatgatgtcaacattgaaaaggccaacaattccctcatcagcaatgatcgcagctggaagagaaacaagttccgcctcacctttgtggccgaagctccagaactcacacaaggtctatccaatgtccacaaaaagcgagtctcagctgcccggctccttagccgtcaaaacctccagagccctaaatccagtcggtcaactatcttcgtgcgtctccacaccaacgggagccaggagctgcagtaccagcctggggaccacctgggtgtcttccctggcaaccacgaggacctcgtgaatgccctgatcgagcggctggaggacgcgccgcctgtcaaccagatggtgaaagtggaactgctggaggagcggaacacggctttaggtgtcatcagtaactggacagacgagctccgcctcccgccctgcaccatcttccaggccttcaagtactacctggacatcaccacgccaccaacgcctctgcagctgcagcagtttgcctccctagctaccagcgagaaggagaagcagcgtctgctggtcctcagcaagggtttgcaggagtacgaggaatggaaatggggcaagaaccccaccatcgtggaggtgctggaggagttcccatctatccagatgccggccaccctgctcctgacccagctgtccctgctgcagccccgctactattccatcagctcctccccagacatgtaccctgatgaagtgcacctcactgtggccatcgtttcctaccgcactcgagatggagaaggaccaattcaccacggcgtatgctcctcctggctcaaccggatacaggctgacgaactggtcccctgtttcgtgagaggagcacccagcttccacctgccccggaacccccaagtcccctgcatcctcgttggaccaggcaccggcattgcccctttccgaagcttctggcaacagcggcaatttgatatccaacacaaaggaatgaacccctgccccatggtcctggtcttcgggtgccggcaatccaagatagatcatatctacagggaagagaccctgcaggccaagaacaagggggtcttcagagagctgtacacggcttactcccgggagccagacaaaccaaagaagtacgtgcaggacatcctgcaggagcagctggcggagtctgtgtaccgagccctgaaggagcaagggggccacatatacgtctgtggggacgtcaccatggctgctgatgtcctcaaagccatccagcgcatcatgacccagcaggggaagctctcggcagaggacgccggcgtattcatcagccggatgagggatgacaaccgataccatgaggatatttttggagtcaccctgcgaacgtacgaagtgaccaaccgccttagatctgagtccattgccttcattgaagagagcaaaaaagacaccgatgaggttttcagctcctaactggaccctcttgcccagccggctgcaagttttgtaagcgcggacagacactgctgaacctttcctctgggaccccctgtggccctcgctctgcctcctgtccttgtcgctgtgccctggtttccctcctcgggcttctcgcccctcagtggtttcctcggccctcctgggtttactccttgagttttcctgctgcgatgcaatgcttttctaatctgcagtggctcttacaaaactctgttcccactccctctcttgccgacaagggcaactcacgggtgcatgaaaccactggaacatggccgtcgctgtgggggtttttttctctggggttcccctggaaaggctgcaggaactaggcacaagctctctgagccagtccctcagccactgaagtccccctttctccttttttatgatgacattttggttgtgcgtgcctgtgtgtgtgtgtgtgtgtgtgtgtgtgtgtgtgatgggccaggtctctgtccgtcctcttccctgcacaagtgtgtcgatcttagattgccactgctttcattgaagaccctcaatgccaagaaacgtgtccctggcccatattaatccctcgtgtgtccataattagggtccacgcccatgtacctgaaacatttggaagccccataattgttctagttagaaagggttcagggcatggggagaggagtgggaaattgattaaaggggctgtctcccaatgaaagaggcattcccagaatttgctgcatttagattttgataccagtgagcagagccctcatgtgacatgaacccatccaatggattgtgcaaatcccctccccaaacccacccataccagctagaatcacttgactttgccacatccattgactgaccccctcctccagcaatagcatccaaggggcctggaagttatgttgttcaaagaagcctggtggcaataaggatcttcccactttgccactggatgactttggatgggtcacttgtcctcagtttttcctagtcataatgtcatacgaacctaaagaatatgaatggattaaatgttaaagctttggtgcctggaaacaatatcaagtaacaatatgattattatttttttattcccccaaagcgggcttgctgcttcacccttggggatgaaataatggaagctggttaaagtggatgaggttggaaagagttgccataatgaggtcccacgtggcttcttcgataggagccacaacttggggtgggaagaacttgtccctcaggcttgttgccctctgcagttgatctccaaagttttaaacctgttaaattaattttgacaaataagttaccctcaactcagatcaaaaatgggcagccaagtcttcggtaggaattggagccggtgtaattcctccctaagaggcaacctgttgaatttactctctcagagtaaatggtgggaagggatccctttgtatacttttttaaatactacaaattagtgtcaggcagttcccagaaagagacaagaaatcctagtggcctcccagactgcagggtccccaaggatggaaagggaatgttctgctggttctaccctgtttgttgtgtcttgctatacagaaaaaccacatttcttttatatactgtacgtgggcatatcttgttgttcagtttgggtgtctgctaaagaggaagtgcactggccctctttgaaagggctttacagtgggggcaccaagaccccaaagggcccaggccaggagactgttaaagtgaaaaggcaatctatgactcaccttgctctgccatccctggcagcccccaccggtgtcctgttcctgccacatggagcttgacttcatgccagctataatctcccctgccttcctttaatcccaatttcccctgctcactcttccacagatataaagaacaaacacttagcatcccacactcaccccttctaatcctgaagggaagcccattctaaactcctttcctgcaaacccatttccagctcctagtagctttcctcccaaaggctttctttccaatcctttatagctttggagacgcctccccaattccccagggaaggaaactgttgtgtccaatccccattaaagacaaattgatcagtgcttcccactccaagtcaagctttatgcaggaatgcttttccatcagggaataaatacttagaagcgcttacaaggtgccaggcacctcctttctgcatgtgcctgcctttctagtagcagacagatggaaacattgtctcattttgtcaaggagtccaaagaaatgattataaaaccaggattcatccttcttctccagaaagatttttttttaagtaaacacctttcaatccccaacacaagctgcttcacaactccaggctagaaggcaggagagcgatctgatgtgtttctttcatttgccagaattcctgataccaaaagcctctctctctgttgagtaacctctcaaggaccagagtggagtccagattgttaggctcagatcaagggtggggaaatactgccctctcgtggtggcttttcatccaggcctcgtagccaaccgtttaagtgcaaaatagaattaagcaatgggtaagcaaaatagggttgacaagatatttgggggttattcgggttatggcccatttatttccctcttccccctgaattgaccagtagcagctccagccccatttcacaaaagtgagtttggccaggaggaatgagacgtctcctgaaataggaacaccggaacatcatgctcacctgccatcactatgcatccagttcccacagcttgtgtcgtgaaagagcagagagatgatgttaaactccttgggaggagagagggcttcttttggtttccctggagtgagacagccaggtgtctttcttttgcggggggacacttcagacccatcaatatggaattttgggagccgacctgagtgcaaatcctaattctgcccctgttggtgcagatggctgtgggcggctcacttgaccttttagagtctgcatacccacctgtataacaaggtggattgaatgagacaatgcccacgaaatgcccagttacagtacctggttcaaaacttactgcattttaatttttcacttaacttataacatgtcttgcttctccagtgtgtggaaggcaccgggcagtttgcagagataagcaaaacacagttcctctcgtgcagaaggttagaatctatttttttttttgacagagtcttgctctgtcacccaggctggcgtacagtggtacgatctcagctcactgcatcctctgcctcccccagttcaagtgattcttctgcctcggcctcctgagtaactgggactacaggcgcctaccaccacgcccagctaagttttgtatttttagtagagtcagggtttcaccatgttggccaggctggtcttgaattcctgacctcaaatgatccacgcacctcagcctcccaaagtgctggattacaggcatgagccaccacgcccagccaaaggttataatctgatggagagagacacccgtcttggaactgacataaatttctggggtttgagaaatgggcgggatttcactggtagcttctggaaggtaagagttgtccaggaattgggaagagtgagaggaaaggcacggacagggagcatgtaagataaattgaggctggctttggaaggctgaggagggtgagaaaaggtgggctgggaccagaccgtggggagaggtgagtggcattacaagaaatttaggctttattcagaaggcaacagggagtccctaagaatgtttttcaaaaagggacattaaggcgattggagttatacttggaaaagaaagttctggccacagtacagagcatggcccgttgagctgttgggggggttattgctgcaaccaaggcttgagtgagggaagaggcggatgtagtgataaagagactccaggaactgaatcagcgtacctggcaccccatccattgtagagggtgagaataaaggagaaattaaagcatcttgcaggctgggcgcggtagctcatgtctgtaatcccagcactttgggaggccgaggtgggtgtatcagttgaggtcaggagttggagaccagtcagccagttagtagaaaccctgactctactaagaaaatacaaaaattagctgggcatggtggcatgcgcctgtagtctcagctacctgggaggctgaggaaggaggatcgcttgagcccaggaggtggaggctgcagtgagccaagattgtaccactgcactccagcctgggtgacagagcaagactcttatctcaaaaaaaataaaataaaataaaataaaataaaacatcttgcccctagctgagagagaggtctctgaagagcaggctcagggaaaagatgagttttcagagctgatgtgatagtcagcttctctggagtcaacagggtgaatccttcccaagtccagccatgcccagatgcccggagggaaaactgacccccagccagtagacattggctaagaacacagaatcttctgaccaaacacgctttcagcagctgcctgctctggactttgaaagaggtcaggtcttgccctaagctcaaaacaagtgagaggtgtcctgacctagctcatagggcaaatggtcctaataggatgggcaatccagatgcctgagccccttcactccgacagcaccagcgcctaatgcagccttttcattcttgccattaggaaatctgtggacttctagcctgtgttttaaaccagccatgtttccttgtatatttccctacccgctgccccacatacccagcatgccgctgtggccaccatgtcctcaaagccttctgtctgtatcaggaatgtagtctgagactgccaggaagcaacaaggagagagaaacactaactagtcttcctttataacccattcatactctctggctgtccccaaccttcatagtctcctgcatccaaatgtcctctttggctcaaaaagtaggccaggcatggtggttcatgcctgtaatagcactttgggagactgaggtgggaggatcacttggggccaggagtttgagaccagcttgggcaacacagcgcaatctcgtctctactaaaaaaaaaaaaaaaaaaaaattagctgggcatgatggcatgctcctgtggtcccagctacttgggaggctgaggcaggaggatcacttggtcccaggagtttgaggcgacagtgagctaggatcgcaccactgcactccagcctgagtgacagagcaagaccctgtctctaaaaaaaattaaaatgaaagaccaggtgctgggattaaggaaacacaggtctgagggtctgagggaaggggcctgcctcccagggagtcaacatagatgttccccatgaacagggatttgactttggaggccaacctggcctggcctctgccctttatctcacactccctatccttggcccactgccagtccctgccttgtggcaaaggggccccaaaagaaaagctgcccttccccaaatgtaaggacccaggtacactttcacccgtggaaagcagtgtctgtcgagagtctgtttcctattaatacttatcaaagccatgtgcgagggaggtggtcagctgtcaatatgccttagtatgtttatatgagtttgttttgttctaaaatacccaaacagttctggtcaagcggggctatgcccgtctggcccaaaacacagtccgttattaacgagatggccctggcaggcgggaacaaatctgcctccatgcactgcttcctgtagtcttttagaaagtaactccaggacatcgaagtgcccagatttgactcctaagttctaggagactgtagcgcagggtctgtcaaccttagcactattggcatttggggctgggtaattctttcttgtgggggccgtcttgggtactgtaggaagctgagcagcattcctggcctccatccacaagatacctgtagcagtgtcctgccaacggtaacaatcaagtatgtcatcagacattgcccaatgtccccagggggcaacacccctctcttggacttcagggtcaagagaatctctgctggctaccccaggacttctcattatagatttcctggagcacgcagcagaaactttgcctagcccagtggttgtttccattatctgctgccaaagtgggatttgagggtgtccgggggagggggcatggggagggcagtatgctttcaaaaacccctcccaggccaggcgtggtggctcatgcctgtaatcacaggactttgggaggccgaggctggcagatcacttgaggctgggagttagagaccaacctggctaacatggcaaaacctcgtctctactaaaaatacaaaaatcagcccggcgtggtggcgggcatctgtaatcccatctactcgggaggctgaggcaggagaattacttgaacccaggaggcagaggctgcagtgagccgagatggcaccactgcactccagcttgttgacagaatgagaccctgtggaaaaaaaaaaaaaagccctcccatgccagaacagaggatggcagtctgtttcaataagacactgtgtccttggtgttggttctgattaagactcactgagatccagtgctcttgagctgggtctcagtcccctcccatgtcctgtgctctgccgccactgttttcattgttgtgttctcgttgtgattgttaagactcacactcctggctcagcagtggttttccagaaggcccaaagagcggtgccgggcaccccacgtcgcagtgtccgttccgggcttgggaagctggggaggtgggcagacctggtcgcatctcaccacacacacacacacacacacacacacacacgctgtcagaaactcggccgtcccccctacctctgagctctcaatgctgctaatctctgccaagtgtccctgtgctccagcaccttccttgaaggactgacgcccaccccacgctctttgcgaggttgtccaggctgtgtttgtcgcatgctcttcttctgtatagttctcatcttccaattttatgggattcaacaaaagcctattatgcttgtttgcattatggttacaatattaaaaagtggattcaaaaaaaa

SEQ ID NO: 103 - DNA, 4206 bp, Homo sapiens
ataactttgtagcgagtcgaaaactgaggctccggccgcagagaactcagcctcattcctgctttaaaatctctcggccacctttgatgaggggactgggcagttctagacagtcccgaagttctcaaggcacaggtctcttcctggtttgactgtccttaccccggggaggcagtgcagccagctgcaagccccacagtgaagaacatctgagctcaaatccagataagtgacataagtgacctgctttgtaaagccatagagatggcctgtccttggaaatttctgttcaagaccaaattccaccagtatgcaatgaatggggaaaaagacatcaacaacaatgtggagaaagccccctgtgccacctccagtccagtgacacaggatgaccttcagtatcacaacctcagcaagcagcagaatgagtccccgcagcccctcgtggagacgggaaagaagtctccagaatctctggtcaagctggatgcaaccccattgtcctccccacggcatgtgaggatcaaaaactggggcagcgggatgactttccaagacacacttcaccataaggccaaagggattttaacttgcaggtccaaatcttgcctggggtccattatgactcccaaaagtttgaccagaggacccagggacaagcctacccctccagatgagcttctacctcaagctatcgaatttgtcaaccaatattacggctccttcaaagaggcaaaaatagaggaacatctggccagggtggaagcggtaacaaaggagatagaaacaacaggaacctaccaactgacgggagatgagctcatcttcgccaccaagcaggcctggcgcaatgccccacgctgcattgggaggatccagtggtccaacctgcaggtcttcgatgcccgcagctgttccactgcccgggaaatgtttgaacacatctgcagacacgtgcgttactccaccaacaatggcaacatcaggtcggccatcaccgtgttcccccagcggagtgatggcaagcacgacttccgggtgtggaatgctcagctcatccgctatgctggctaccagatgccagatggcagcatcagaggggaccctgccaacgtggaattcactcagctgtgcatcgacctgggctggaagcccaagtacggccgcttcgatgtggtccccctggtcctgcaggccaatggccgtgaccctgagctcttcgaaatcccacctgaccttgtgcttgaggtggccatggaacatcccaaatacgagtggtttcgggaactggagctaaagtggtacgccctgcctgcagtggccaacatgctgcttgaggtgggcggcctggagttcccagggtgccccttcaatggctggtacatgggcacagagatcggagtccgggacttctgtgacgtccagcgctacaacatcctggaggaagtgggcaggagaatgggcctggaaacgcacaagctggcctcgctctggaaagaccaggctgtcgttgagatcaacattgctgtgctccatagtttccagaagcagaatgtgaccatcatggaccaccactcggctgcagaatccttcatgaagtacatgcagaatgaataccggtcccgtgggggctgcccggcagactggatttggctggtccctcccatgtctgggagcatcacccccgtgtttcaccaggagatgctgaactacgtcctgtcccctttctactactatcaggtagaggcctggaaaacccatgtctggcaggacgagaagcggagacccaagagaagagagattccattgaaagtcttggtcaaagctgtgctctttgcctgtatgctgatgcgcaagacaatggcgtcccgagtcagagtcaccatcctctttgcgacagagacaggaaaatcagaggcgctggcctgggacctgggggccttattcagctgtgccttcaaccccaaggttgtctgcatggataagtacaggctgagctgcctggaggaggaacggctgctgttggtggtgaccagtacgtttggcaatggagactgccctggcaatggagagaaactgaagaaatcgctcttcatgctgaaagagctcaacaacaaattcaggtacgctgtgtttggcctcggctccagcatgtaccctcggttctgcgcctttgctcatgacattgatcagaagctgtcccacctgggggcctctcagctcaccccgatgggagaaggggatgagctcagtgggcaggaggacgccttccgcagctgggccgtgcaaaccttcaaggcagcctgtgagacgtttgatgtccgaggcaaacagcacattcagatccccaagctctacacctccaatgtgacctgggacccgcaccactacaggctcgtgcaggactcacagcctttggacctcagcaaagccctcagcagcatgcatgccaagaacgtgttcaccatgaggctcaaatctcggcagaatctacaaagtccgacatccagccgtgccaccatcctggtggaactctcctgtgaggatggccaaggcctgaactacctgccgggggagcaccttggggtttgcccaggcaaccagccggccctggtccaaggtatcctggagcgagtggtggatggccccacaccccaccagacagtgcgcctggaggccctggatgagagtggcagctactgggtcagtgacaagaggctgcccccctgctcactcagccaggccctcacctacttcctggacatcaccacacccccaacccagctgctgctccaaaagctggcccaggtggccacagaagagcctgagagacagaggctggaggccctgtgccagccctcagagtacagcaagtggaagttcaccaacagccccacattcctggaggtgctagaggagttcccgtccctgcgggtgtctgctggcttcctgctttcccagctccccattctgaagcccaggttctactccatcagctcctcccgggatcacacgcccacagagatccacctgactgtggccgtggtcacctaccacacccgagatggccagggtcccctgcaccacggcgtctgcagcacatggctcaacagcctgaagccccaagacccagtgccctgctttgtgcggaatgccagcggcttccacctccccgaggatccctcccatccttgcatcctcatcgggcctggcacaggcatcgcgcccttccgcagtttctggcagcaacggctccatgactcccagcacaagggagtgcggggaggccgcatgaccttggtgtttgggtgccgccgcccagatgaggaccacatctaccaggaggagatgctggagatggcccagaagggggtgctgcatgcggtgcacacagcctattcccgcctgcctggcaagcccaaggtctatgttcaggacatcctgcggcagcagctggccagcgaggtgctccgtgtgctccacaaggagccaggccacctctatgtttgcggggatgtgcgcatggcccgggacgtggcccacaccctgaagcagctggtggctgccaagctgaaattgaatgaggagcaggtcgaggactatttctttcagctcaagagccagaagcgctatcacgaagatatctttggtgctgtatttccttacgaggcgaagaaggacagggtggcggtgcagcccagcagcctggagatgtcagcgctctgagggcctacaggaggggttaaagctgccggcacagaacttaaggatggagccagctctgcattatctgaggtcacagggcctggggagatggaggaaagtgatatcccccagcctcaagtcttatttcctcaacgttgctccccatcaagccctttacttgacctcctaacaagtagcaccctggattgatcggagcctcctctctcaaactggggcctccctggtcccttggagacaaaatcttaaatgccaggcctggcaagtgggtgaaagatggaacttgctgctgagtgcaccacttcaagtgaccaccaggaggtgctatcgcaccactgtgtatttaactgccttgtgtacagttatttatgcctctgtatttaaaaaactaacacccagtctgttccccatggccacttgggtcttccctgtatgattccttgatggagatatttacatgaattgcattttactttaatcaca

SEQ ID NO: 104 - DNA, 642 bp, Homo sapiens
tgcatcgttagcttctcctgataaactaattgcctcacattgtcactgcaaatcgacacctattaatgggtctcacctcccaactgcttccccctctgttcttcctgctagcatgtgccggcaactttgtccacggacacaagtgcgatatcaccttacaggagatcatcaaaactttgaacagcctcacagagcagaagactctgtgcaccgagttgaccgtaacagacatctttgctgcctccaagaacacaactgagaaggaaaccttctgcagggctgcgactgtgctccggcagttctacagccaccatgagaaggacactcgctgcctgggtgcgactgcacagcagttccacaggcacaagcagctgatccgattcctgaaacggctcgacaggaacctctggggcctggcgggcttgaattcctgtcctgtgaaggaagccaaccagagtacgttggaaaacttcttggaaaggctaaagacgatcatgagagagaaatattcaaagtgttcgagctgaatattttaatttatgagtttttgatagctttattttttaagtatttatatatttataactcatcataaaataaagtatatatagaatctaaaaaaaaaaaaaaaaaaaaaaaaaa

SEQ ID NO: 105 - DNA, 594 bp, Homo sapiens
tgcatcgttagcttctcctgataaactaattgcctcacattgtcactgcaaatcgacacctattaatgggtctcacctcccaactgcttccccctctgttcttcctgctagcatgtgccggcaactttgtccacggacacaagtgcgatatcaccttacaggagatcatcaaaactttgaacagcctcacagagcagaagaacacaactgagaaggaaaccttctgcagggctgcgactgtgctccggcagttctacagccaccatgagaaggacactcgctgcctgggtgcgactgcacagcagttccacaggcacaagcagctgatccgattcctgaaacggctcgacaggaacctctggggcctggcgggcttgaattcctgtcctgtgaaggaagccaaccagagtacgttggaaaacttcttggaaaggctaaagacgatcatgagagagaaatattcaaagtgttcgagctgaatattttaatttatgagtttttgatagctttattttttaagtatttatatatttataactcatcataaaataaagtatatatagaatctaaaaaaaaaaaaaaaaaaaaaaaaaa

SEQ ID NO: 106 - DNA, 1629 bp, Homo sapiens
acacatcaggggcttgctcttgcaaaaccaaaccacaagacagacttgcaaaagaaggcatgcacagctcagcactgctctgttgcctggtcctcctgactggggtgagggccagcccaggccagggcacccagtctgagaacagctgcacccacttcccaggcaacctgcctaacatgcttcgagatctccgagatgccttcagcagagtgaagactttctttcaaatgaaggatcagctggacaacttgttgttaaaggagtccttgctggaggactttaagggttacctgggttgccaagccttgtctgagatgatccagttttacctggaggaggtgatgccccaagctgagaaccaagacccagacatcaaggcgcatgtgaactccctgggggagaacctgaagaccctcaggctgaggctacggcgctgtcatcgatttcttccctgtgaaaacaagagcaaggccgtggagcaggtgaagaatgcctttaataagctccaagagaaaggcatctacaaagccatgagtgagtttgacatcttcatcaactacatagaagcctacatgacaatgaagatacgaaactgagacatcagggtggcgactctatagactctaggacataaattagaggtctccaaaatcggatctggggctctgggatagctgacccagccccttgagaaaccttattgtacctctcttatagaatatttattacctctgatacctcaacccccatttctatttatttactgagcttctctgtgaacgatttagaaagaagcccaatattataatttttttcaatatttattattttcacctgtttttaagctgtttccatagggtgacacactatggtatttgagtgttttaagataaattataagttacataagggaggaaaaaaaatgttctttggggagccaacagaagcttccattccaagcctgaccacgctttctagctgttgagctgttttccctgacctccctctaatttatcttgtctctgggcttggggcttcctaactgctacaaatactcttaggaagagaaaccagggagcccctttgatgattaattcaccttccagtgtctcggagggattcccctaacctcattccccaaccacttcattcttgaaagctgtggccagcttgttatttataacaacctaaatttggttctaggccgggcgcggtggctcacgcctgtaatcccagcactttgggaggctgaggcgggtggatcacttgaggtcaggagttcctaaccagcctggtcaacatggtgaaaccccgtctctactaaaaatacaaaaattagccgggcatggtggcgcgcacctgtaatcccagctacttgggaggctgaggcaagagaattgcttgaacccaggagatggaagttgcagtgagctgatatcatgcccctgtactccagcctgggtgacagagcaagactctgtctcaaaaaataaaaataaaaataaatttggttctaatagaactcagttttaactagaatttattcaattcctctgggaatgttacattgtttgtctgtcttcatagcagattttaattttgaataaataaatgtatcttattcacatc

SEQ ID NO: 107 - DNA, 2217 bp, Homo sapiens
ccccgccgccgccgcccttcgcgccctgggccatctccctcccacctccctccgcggagcagccagacagcgagggccccggccgggggcaggggggacgccccgtccggggcacccccccggctctgagccgcccgcggggccggcctcggcccggagcggaggaaggagtcgccgaggagcagcctgaggccccagagtctgagacgagccgccgccgcccccgccactgcggggaggagggggaggaggagcgggaggagggacgagctggtcgggagaagaggaaaaaaacttttgagacttttccgttgccgctgggagccggaggcgcggggacctcttggcgcgacgctgccccgcgaggaggcaggacttggggaccccagaccgcctccctttgccgccggggacgcttgctccctccctgccccctacacggcgtccctcaggcgcccccattccggaccagccctcgggagtcgccgacccggcctcccgcaaagacttttccccagacctcgggcgcaccccctgcacgccgccttcatccccggcctgtctcctgagcccccgcgcatcctagaccctttctcctccaggagacggatctctctccgacctgccacagatcccctattcaagaccacccaccttctggtaccagatcgcgcccatctaggttatttccgtgggatactgagacacccccggtccaagcctcccctccaccactgcgcccttctccctgaggacctcagctttccctcgaggccctcctaccttttgccgggagacccccagcccctgcaggggcggggcctccccaccacaccagccctgttcgcgctctcggcagtgccggggggcgccgcctcccccatgccgccctccgggctgcggctgctgccgctgctgctaccgctgctgtggctactggtgctgacgcctggccggccggccgcgggactatccacctgcaagactatcgacatggagctggtgaagcggaagcgcatcgaggccatccgcggccagatcctgtccaagctgcggctcgccagccccccgagccagggggaggtgccgcccggcccgctgcccgaggccgtgctcgccctgtacaacagcacccgcgaccgggtggccggggagagtgcagaaccggagcccgagcctgaggccgactactacgccaaggaggtcacccgcgtgctaatggtggaaacccacaacgaaatctatgacaagttcaagcagagtacacacagcatatatatgttcttcaacacatcagagctccgagaagcggtacctgaacccgtgttgctctcccgggcagagctgcgtctgctgaggctcaagttaaaagtggagcagcacgtggagctgtaccagaaatacagcaacaattcctggcgatacctcagcaaccggctgctggcacccagcgactcgccagagtggttatcttttgatgtcaccggagttgtgcggcagtggttgagccgtggaggggaaattgagggctttcgccttagcgcccactgctcctgtgacagcagggataacacactgcaagtggacatcaacgggttcactaccggccgccgaggtgacctggccaccattcatggcatgaaccggcctttcctgcttctcatggccaccccgctggagagggcccagcatctgcaaagctcccggcaccgccgagccctggacaccaactattgcttcagctccacggagaagaactgctgcgtgcggcagctgtacattgacttccgcaaggacctcggctggaagtggatccacgagcccaagggctaccatgccaacttctgcctcgggccctgcccctacatttggagcctggacacgcagtacagcaaggtcctggccctgtacaaccagcataacccgggcgcctcggcggcgccgtgctgcgtgccgcaggcgctggagccgctgcccatcgtgtactacgtgggccgcaagcccaaggtggagcagctgtccaacatgatcgtgcgctcctgcaagtgcagctgaggtcccgccccgccccgccccgccccggcaggcccggccccaccccgccccgcccccgctgccttgcccatgggggctgtatttaaggacacccgtgccccaagcccacctggggccccattaaagatggagagaggactgcggaaaaaaaaaaaaaaaaaa

SEQ ID NO: 108 - DNA, 1606 bp, Homo sapiens
aaatgtgaccggccgcggctccggcagtcaacgcctgcctcctctcgagcgtcctcagcgcagccgccgcccgcggagccagcacgaacgagcccagcaccggccggatggagcgtccgcaacccgacagcatgccccaggatttgtcagaggccctgaaggaggccaccaaggaggtgcacacccaggcagagaatgctgagttcatgaggaactttcagaagggccaggtgacccgagacggcttcaagctggtgatggcctccctgtaccacatctatgtggccctggaggaggagattgagcgcaacaaggagagcccagtcttcgcccctgtctacttcccagaagagctgcaccgcaaggctgccctggagcaggacctggccttctggtacgggccccgctggcaggaggtcatcccctacacaccagccatgcagcgctatgtgaagcggctccacgaggtggggcgcacagagcccgagctgctggtggcccacgcctacacccgctacctgggtgacctgtctgggggccaggtgctcaaaaagattgcccagaaagccctggacctgcccagctctggcgagggcctggccttcttcaccttccccaacattgccagtgccaccaagttcaagcagctctaccgctcccgcatgaactccctggagatgactcccgcagtcaggcagagggtgatagaagaggccaagactgcgttcctgctcaacatccagctctttgaggagttgcaggagctgctgacccatgacaccaaggaccagagcccctcacgggcaccagggcttcgccagcgggccagcaacaaagtgcaagattctgcccccgtggagactcccagagggaagcccccactcaacacccgctcccaggctccgcttctccgatgggtccttacactcagctttctggtggcgacagttgctgtagggctttatgccatgtgaatgcaggcatgctggctcccagggccatgaactttgtccggtggaaggccttctttctagagagggaattctcttggctggcttccttaccgtgggcactgaaggctttcagggcctccagccctctcactgtgtccctctctctggaaaggaggaaggagcctatggcatcttccccaacgaaaagcacatccaggcaatggcctaaacttcagagggggcgaagggatcagccctgcccttcagcatcctcagttcctgcagcagagcctggaagacaccctaatgtggcagctgtctcaaacctccaaaagccctgagtttcaagtatccttgttgacacggccatgaccactttccccgtgggccatggcaatttttacacaaacctgaaaagatgttgtgtcttgtgtttttgtcttatttttgttggagccactctgttcctggctcagcctcaaatgcagtatttttgttgtgttctgttgtttttatagcagggttggggtggtttttgagccatgcgtgggtggggagggaggtgtttaacggcactgtggccttggtctaacttttgtgtgaaataataaacaacattgtctgatagtagcttgaaaaaaaaaaaaaaaaaa

SEQ ID NO: 109 - DNA, 1587 bp, Homo sapiens
cgcggccgcctgtctgcacagacagcaccatgtcgctcatggtcgtcagcatggcgtgtgttgggttcttcttgctgcagggggcctggccacatgagggagtccacagaaaaccttccctcctggcccacccaggtcgcctggtgaaatcagaagagacagtcatcctgcaatgttggtcagatgtcaggtttgagcacttccttctgcacagagaagggaagtttaaggacactttgcacctcattggagagcaccatgatggggtctccaaagccaacttctccatcggtcccatgatgcaagaccttgcagggacctacagatgctacggttctgttactcactccccctatcagttgtcagctcccagtgaccctctggacatcgtcatcacaggtctatatgagaaaccttctctctcagcccagccgggccccacggttctggcaggagagagcgtgaccttgtcctgcagctcccggagctcctatgacatgtaccatctatccagggagggggaggcccatgaatgtaggttctctgcagggcccaaggtcaacggaacattccaggccgactttcctctgggccctgccacccacggaggaacctacagatgcttcggctctttccgtgactctccatacgagtggtcaaactcgagtgacccactgcttgtttctgtcacaggaaacccttcaaatagttggccttcacccactgaaccaagctctaaaaccggtaacccccgacacctgcacattctgattgggacctcagtggtcatcatcctcttcatcctcctcttctttctccttcatcgctggtgctccaacaaaaaaaatgctgcggtaatggaccaagagtctgcagggaacagaacagcgaatagcgaggactctgatgaacaagaccctcaggaggtgacatacacacagttgaatcactgcgttttcacacagagaaaaatcactcgcccttctcagaggcccaagacacccccaacagatatcatcgtgtacacggaacttccaaatgctgagtccagatccaaagttgtctcctgcccatgagcaccacagtcaggccttgagggcgtcttctagggagacaacagccctgtctcaaaaccgggttgccagctcccatgtaccagcagctggaatctgaaggcatgagtctgcatcttagggcatcgctcttcctcacaccacaaatctgaatgtgcctctcacttgcttacaaatgtctaaggtccccactgcctgctggagaaaaaacacactcctttgcttagcccacagttctccatttcacttgacccctgcccacctctccaacctaactggcttacttcctagtctacttgaggctgcaatcacactgaggaactcacaattccaaacatacaagaggctccctcttaacgcagcacttagacacgtgttgttccaccttccctcatgctgttccacctcccctcagactagctttcagtcttctgtcagcagtaaaacttatatattttttaaaataacttcaatgtagttttccatccttcaaataaacatgtctgcccccatg

SEQ ID NO: 110 - DNA, 1559 bp, Homo sapiens
tgtctgcacagacagcaccatgtcgctcatggtcgtcagcatggcgtgtgttgggttcttcttgctgcagggggcctggccacatgagggagtccacagaaaaccttccctcctggcccacccaggtcccctggtgaaatcagaagagacagtcatcctgcaatgttggtcagatgtcaggtttgagcacttccttctgcacagagaggggaagtataaggacactttgcacctcattggagagcaccatgatggggtctccaaggccaacttctccatcggtcccatgatgcaagaccttgcagggacctacagatgctacggttctgttactcactccccctatcagttgtcagctcccagtgaccctctggacatcgtcatcacaggtctatatgagaaaccttctctctcagcccagccgggccccacggttttggcaggagagagcgtgaccttgtcctgcagctcccggagctcctatgacatgtaccatctatccagggagggggaggcccatgaacgtaggttctctgcagggcccaaggtcaacggaacattccaggccgactttcctctgggccctgccacccacggaggaacctacagatgcttcggctctttccgtgactctccctatgagtggtcaaactcgagtgacccactgcttgtttctgtcacaggaaacccttcaaatagttggccttcacccactgaaccaagctccaaaaccggtaaccccagacacctgcatgttctgattgggacctcagtggtcaaaatccctttcaccatcctcctcttctttctccttcatcgctggtgctccaacaaaaaaaatgctgctgtaatggaccaagagcctgcagggaacagaacagtgaacagcgaggattctgatgaacaagaccatcaggaggtgtcatacgcataattggatcactgtgttttcacacagagaaaaatcactcgcccttctgagaggcccaagacacccccaacagataccagcatgtacatagaacttccaaatgctgagcccagatccaaagttgtcttctgtccacgagcaccacagtcaggccttgaggggatcttctagggagacaacagccctgtctcaaaaccgggttgccagctcccatgtaccagcagctggaatctgaaggcatcagtcttcatcttagggcatcgctcttcctcacaccacgaatctgaacatgcctctctcttgcttacaaatgtctaaggtccccactgcctgctggagagaaaacacactcctttgcttagcccacaattctccatttcacttgacccctgcccacctctccaacctaactggcttacttcctagtctacctgaggctgcaatcacactgaggaactcacaattccaaacatacaagaggctgcctcttaacacagcacttagacacgtgctgttccacctcccttcagactatctttcagccttctgccagcagtaaaacttataaattttttaaataatttcaatgtagttttcccgccttcaaataaacatgtctgccctcatg

SEQ ID NO: 111 - DNA, 1596 bp, Homo sapiens
agctggggcgcggccgcctgtctgcacagacagcaccatgtcgctcatggtcgtcagcatggtgtgtgttgggttcttcttgctgcagggggcctggccacatgagggagtccacagaaaaccttccctcctggcccacccaggtcccctggtgaaatcagaagagacagtcatcctgcaatgttggtcagatgtcaggtttcagcacttccttctgcacagagaagggaagtttaaggacactttgcacctcattggagagcaccatgatggggtctccaaggccaacttctccatcggtcccatgatgcaagaccttgcagggacctacagatgctacggttctgttactcactccccctatcagttgtcagctcccagtgaccctctggacatcgtcatcacaggtctatatgagaaaccttctctctcagcccagccgggccccacggttctggcaggagagagcgtgaccttgtcctgcagctcccggagctcctatgacatgtaccatctatccagggagggggaggcccatgaacgtaggttctctgcagggcccaaggtcaacggaacattccaggccgactttcctctgggccctgccacccacggaggaacctacagatgcttcggctctttccgtgactctccatacgagtggtcaaactcgagtgacccactgcttgtttctgtcacaggaaacccttcaaatagttggccttcacccactgaaccaagctccgaaaccggtaaccccagacacctgcatgttctgattgggacctcagtggtcatcatcctcttcatcctcctcctcttctttctccttcatcgctggtgctgcaacaaaaaaaatgctgttgtaatggaccaagagcctgcagggaacagaacagtgaacagggaggactctgatgaacaagaccctcaggaggtgacatatgcacagttgaatcactgcgttttcacacagagaaaaatcactcgcccttctcagaggcccaagacacccccaacagatatcatcgtgtacacggaacttccaaatgctgagccctgatccaaagttgtctcctgcccatgagcaccacagtcaggccttgaggggatcttctagggagacaacagccctgtctcaaaactgggttgccagctccaatgtaccagcagctggaatctgaaggcgtgagtctgcatcttagggcatcgctcttcctcacaccacaaatctgaacgtgcctctcccttgcttacaaatgtctaaggtccccactgcctgctggagagaaaacacactcctttgcttagcccacaattctccatttcacttgacccctgcccacctctccaacctaactggcttacttcctagtctacttgaggctgcaatcacactgaggaactcacaattccaaacatacaagaggctccctcttaacacggcacttagacacgtgctgttccaccttccctcatgctgttccacctcccctcagactagctttcagccttctgtcagcagtaaaacttatatattttttaaaataatttcaatgtagttttccctccttcaaataaacatgtctgccctca

SEQ ID NO: 112 - DNA, 1602 bp, Homo sapiens
aggggtgcggccgcctgtctgcaccggcagcaccatgtcgctcatggtcatcagcatggcgtgtgttgcgttcttcttgctgcagggggcctggccacatgagggattccgcagaaaaccttccctcctggcccacccaggtcccctggtgaaatcagaagagacagtcatcctgcaatgttggtcagatgtcatgtttgagcacttccttctgcacagagaggggacgtttaaccacactttgcgcctcattggagagcacattgatggggtctccaagggcaacttctccatcggtcgcatgacacaagacctggcagggacctacagatgctacggttctgttactcactccccctatcagttgtcagcgcccagtgaccctctggacatcgtgatcacaggtctatatgagaaaccttctctctcagcccagccgggccccacggttctggcaggagagagcgtgaccttgtcctgcagctcccggagctcctatgacatgtaccatctatccagggaaggggaggcccatgaacgtaggctccctgcagggcccaaggtcaacagaacattccaggccgactttcctctggaccctgccacccacggagggacctacagatgcttcggctctttccgtgactctccatacgagtggtcaaagtcaagtgacccactgcttgtttctgtcacaggaaactcttcaaatagttggccttcacccactgaaccaagctccgaaaccggtaaccccagacacctacacgttctgattgggacctcagtggtcaaactccctttcaccatcctcctcttctttctccttcatcgctggtgctccaacaaaaaaaatgcatctgtaatggaccaagggcctgcggggaacagaacagtgaacagggaggattctgatgaacaggaccatcaggaggtgtcatacgcataattggatcactgtgttttcacacagagaaaaatcactcccccttctcagaggcccaagacacccccaacagataccagcatgtacatagaacttccaaatgctgagtccagatccaaagctgtcttctgtccacgagcaccacagtcaggccttgaggggatcttctagggagacaacagccctgtctcaaaaccgggttgccagctcccatgtaccagcagctggaatctgaaggcatcagtcttcatcttaggggatcgctcttcctcaaaccacgaatctgaacatgcctctctcttgcttacaaatgtctaaggtccccactgcctgctggagagaaaacacactcctttgcttagcccacaattctccatttcacttgacccctgcccacctctccaacctaactggcttacttcctagtctacttgaggctgcaatcacactgaggaactcacaattccaaacatacaagaggctccctcttaacacagcacttagacacgtgctgttccaccttctctcatgcagttccacctcccctcagactatctttcagccttctgtcagcagtaaaacttataaattgtttttagtaatttcaatgtagttttccctccttcaaataaacatgtctgccctcatggtttcga

SEQ ID NO: 113 - DNA, 1505 bp, Homo sapiens
tcgagccgagtcactgcgtcctggcagcagaagctgcaccatgtccatgtcacccacggtcatcatcctggcatgtcttgggttcttcttggaccagagtgtgtgggcacacgtgggtggtcaggacaagcccttctgctctgcctggcccagcgctgtggtgcctcaaggaggacacgtgactcttcggtgtcactatcgtcgtgggtttaacatcttcacgctgtacaagaaagatggggtccctgtccctgagctctacaacagaatattctggaacagtttcctcattagccctgtgaccccagcacacgcagggacctacagatgtcgaggttttcacccgcactcccccactgagtggtcggcacccagcaaccccctggtgatcatggtcacaggtctatatgagaaaccttcgcttacagcccggccgggccccacggttcgcgcaggagagaacgtgaccttgtcctgcagctcccagagctcctttgacatctaccatctatccagggagggggaagcccatgaacttaggctccctgcagtgcccagcatcaatggaacattccaggccgacttccctctgggtcctgccacccacggagagacctacagatgcttcggctctttccatggatctccctacgagtggtcagacccgagtgacccactgcctgtttctgtcacaggaaacccttctagtagttggccttcacccactgaaccaagcttcaaaactgatgctgctgtaatgaaccaagagcctgcgggacacagaacagtgaacagggaggactctgatgaacaagaccctcaggaggtgacatacgcacagttggatcactgcattttcacacagagaaaaatcactggcccttctcagaggagcaagagaccctcaacagataccagcgtgtgtatagaacttccaaatgctgagcccagagcgttgtctcctgcccatgagcaccacagtcaggccttgatgggatcttctagggagacaacagccctgtctcaaacccagcttgccagctctaatgtaccagcagctggaatctgaaggcgtgagtctccatcttagagcatcactcttcctcacaccacaaatctggtgcctgtctcttgcttaccaatgtctaaggtccccactgcctgctgcagagaaaacacactcctttgcttagcccacaattctctatttcacttgacccctgcccacctctccaacctaactggcttacttcctagtctacttgaggctgcaatcacactgaggaactcacaattccaaacatacaagaggctctctcttaacacggcacttagacacgtgctgttccaccttccctcgtgctgttccacctttcctcagactatttttcagccttctggcatcagcaaaccttataaaatttttttgatttcagtgtagttctctcctcttcaaataaacatgtctgccttcaaaaaaaaaaaaaaaaaaaaaaaaaaaaaaa

SEQ ID NO: 114 - DNA, 1885 bp, Homo sapiens
ggggcgcggcctcctgtctgcaccggcagcaccatgtcgctcacggtcgtcagcatggcgtgcgttgggttcttcttgctgcagggggcctggccactcatgggtggtcaggacaaacccttcctgtctgcccggcccagcactgtggtgcctcgaggaggacacgtggctcttcagtgtcactatcgtcgtgggtttaacaatttcatgctgtacaaagaagacagaagccacgttcccatcttccacggcagaatattccaggagagcttcatcatgggccctgtgaccccagcacatgcagggacctacagatgtcggggttcacgcccacactccctcactgggtggtcggcacccagcaaccccctggtgatcatggtcacaggaaaccacagaaaaccttccctcctggcccacccagggcccctgctgaaatcaggagagacagtcatcctgcaatgttggtcagatgtcatgtttgagcacttctttctgcacagagaggggatctctgaggacccctcacgcctcgttggacagatccatgatggggtctccaaggccaacttctccatcggtcccttgatgcctgtccttgcaggaacctacagatgttatggttctgttcctcactccccctatcagttgtcagctcccagtgaccccctggacatcgtgatcacaggtctatatgagaaaccttctctctcagcccagccgggccccacggttcaggcaggagagaacgtgaccttgtcctgtagctcctggagctcctatgacatctaccatctgtccagggaaggggaggcccatgaacgtaggctccgtgcagtgcccaaggtcaacagaacattccaggcagactttcctctgggccctgccacccacggagggacctacagatgcttcggctctttccgtgccctgccctgcgtgtggtcaaactcaagtgacccactgcttgtttctgtcacaggaaacccttcaagtagttggccttcacccacagaaccaagctccaaatctggtatctgcagacacctgcatgttctgattgggacctcagtggtcatcttcctcttcatcctcctcctcttctttctcctttatcgctggtgctccaacaaaaagaatgctgctgtaatggaccaagagcctgcgggggacagaacagtgaataggcaggactctgatgaacaagaccctcaggaggtgacgtacgcacagttggatcactgcgttttcatacagagaaaaatcagtcgcccttctcagaggcccaagacacccctaacagataccagcgtgtacacggaacttccaaatgctgagcccagatccaaagttgtctcctgcccacgagcaccacagtcaggtcttgagggggttttctagggagacaacagccctgtctcaaaaccaggttgccagatccaatgaaccagcagctggaatctgaaggcatcagtctgcatcttaggggatcgctcttcctcacaccacgaatctgaacatgcctctctcttgcttacaaatgcctaaggtcgccactgcctgctgcagagaaaacacactcctttgcttagcccacaagtatctatttcacttgacccctgcccacctctccaacctaactggcttacttcctagtcctacttgaggctgcaatcacactgaggaactcacaattccaaacatacaagaggctccctcttaacacggcacttacacacttgctgttccaccttccctcatgctgttccacctcccctcagactatctttcagccttctgtcatcagtaaaatttataaattttttttataacttcagtgtagctctctcctcttcaaataaacatgtctgccctcatggtttcg

SEQ ID NO: 115 - DNA, 1691 bp, Homo sapiens
gtctgcaccggcagcaccatgtcgctcatggtcgtcagcatggcgtgtgttgggttcttcttgctggaggggccctggccacatgtgggtggtcaggacaagcccttcctctctgcctggcccggcactgtggtgtctgaaggacaacatgtgactcttcagtgtcgctctcgtcttgggtttaacgaattcagtctgtccaaagaagacgggatgcctgtccctgagctctacaacagaatattccggaacagctttctcatgggccctgtgaccccagcacatgcagggacctacagatgttgcagttcacacccacactcccccactgggtggtcggcacccagcaaccctgtggtgatcatggtcacaggagtccacagaaaaccttccctcctggcccacccaggtcccctggtgaaatcgggagagacggtcatcctgcaatgttggtcagatgtcaggtttgagcgcttccttctgcacagagaggggatcactgaggaccccttgcgcctcgttggacagctccacgatgcgggttcccaggtcaactattccatgggtcccatgacacctgcccttgcagggacctacagatgctttggttctgtcactcacttaccctatgagttgtcggctcccagtgaccctctggacatcgtggtcgtaggtctatatgggaaaccttctctctcagcccagccgggccccacggttcaggcaggagagaatgtgaccttgtcctgcagctcccggagcttgtttgacatttaccatctatccagggaggcagaggccggtgaacttaggctcactgcggtgctgagggtcaatggaacattccaggccaacttccctctgggccctgtgacccacggagggaactacagatgcttcggctctttccgtgccctgccccacgcgtggtcagacccgagtgacccactgcccgtttctgtcacaggtaactccagacacctgcacgttctgattgggacctcagtggtcatcatcccctttgctatcctcctcttctttctccttcatcgctggtgtgccaacaaaaagaatgctgttgtaatggaccaagagcctgcagggaacagaacagtgaacagggaggactctgatgaacaagaccctcaggaggtgacatacgcacagttgaatcactgcgttttcacacagagaaaaatcactcgcccttctcagaggcccaagacacccccaacagataccagcgtgtaacacggaacttccaaatgctgagcgcagatccaaagttgtcttctgtccactagcaccacagtcaggccttgatgggatcttctagggagacaatagccctgtctcaaaaccgggttgccagctcccatgtaccagcagctggactctgaaggcgtgagtctgcatcttagggcatcgctcttcctcacaccacgaatctgaacatgcctctctcttgcttacaaatgtctaaggtccccactgcctgctggagagaaaacacacttgcttagcccacaattctccatttcacttgacccctgcccacctctccaacctaactggcttacttcctagtctacttgaggctgcgatcacactgaggaactcacaattccaaacatataagaggctccctcttaacacggcacttagatacgtgctattccacctttcctcag

SEQ ID NO: 116 - DNA, 1598 bp, Homo sapiens
gagctcggtcgcggctgcctgtctgctccggcagcaccatgtcgctcttggtcgtcagcatggcgtgtgttgggttcttcttgctgcagggggcctggccacatgagggagtccacagaaaaccttccctcctggcccacccaggtcgcctggtgaaatcagaagagacagtcatcctgcagtgttggtcagatgtcatgtttgaacacttccttctgcacagagaggggatgtttaacgacactttgcgcctcattggagaacaccatgatggggtctccaaggccaacttctccatcagtcgcatgacgcaagacctggcagggacctacagatgctacggttctgttactcactccccctatcaggtgtcagctcccagtgaccctctggacatcgtgatcataggtctatatgagaaaccttctctctcagcccagctgggccccacggttctggcaggagagaatgtgaccttgtcctgcagctcccggagctcctatgacatgtaccatctatccagggaaggggaggcccatgaacgtaggctccctgcagggcccaaggtcaacggaacattccaggctgactttcctctgggccctgccacccacggagggacctacagatgcttcggctctttccatgactctccatacgagtggtcaaagtcaagtgacccactgcttgtttctgtcacaggaaacccttcaaatagttggccttcacccactgaaccaagctccaaaaccggtaacccccgacacctgcacattctgattgggacctcagtggtcatcatcctcttcatcctcctcttctttctccttcatcgctggtgctccaacaaaaaaaatgctgcggtaatggaccaagagtctgcaggaaacagaacagcgaatagcgaggactctgatgaacaagaccctcaggaggtgacatacacacagttgaatcactgcgttttcacacagagaaaaatcactcgcccttctcagaggcccaagacacccccaacagatatcatcgtgtacacggaacttccaaatgctgagtccagatccaaagttgtctcctgcccatgagcaccacagtcaggccttgagggcgtcttctagggagacaacagccctgtctcaaaaccgggttgccagctcccatgtaccagcagctggaatctgaaggcgtgagtctgcatcttagggcatcgatcttcctcacaccacaaatctgaatgtgcctctctcttgcttacaaatgtctaaggtccccactgcctgctggagaaaaaacacactcctttgcttaacccacagttctccatttcacttgacccctgcccacctctccaacctaactggcttacttcctagtctacttgaggctgcaatcacactgaggaactcacaattccaaacatacaagaggctccctcttaacgcagcacttagacacgtgttgttccaccttccctcatgctgttccacctcccctcagactagctttcagtcttctgtcagcagtaaaacttatatattttttaaaataacttcaatgtagttttccatccttcaaataaacatgtctgcccccatggt

SEQ ID NO: 117 - DNA, 1101 bp, Homo sapiens
caccggcagcaccatgtcgctcacggtcgtcagcatggcgtgtgttgggttcttcttgctgcagggggcctggccacatgagggagtccacagaaaaccttccctcctggcccacccaggtcgcctggtgaaatcagaagagacagtcatcctgcaatgttggtcagatgtcatgtttgaacacttccttctgcacagagaggggatgtttaacgacactttgcgcctcattggagaacaccatgatggggtctccaaggccaacttctccatcagtcgcatgaagcaagacctggcagggacctacagatgctacggttctgttactcactccccctatcagttgtcagctcccagtgaccctctggacatcgtgatcataggtctatatgagaaaccttctctctcagcccagccgggccccacggttctggcaggagagaatgtgaccttgtcctgcagctcccggagctcctatgacatgtaccatctatccagggaaggggaggcccatgaacgtaggctccctgcagggaccaaggtcaacggaacattccaggccaactttcctctgggccctgccacccatggagggacctacagatgcttcggctctttccgtgactctccatacgagtggtcaaagtcaagtgacccactgcttgtttctgtcacaggaaacccttcaaatagttggccttcacccactgaaccaagctccgaaaccggtaaccccagacacctacatgttctgattgggacctcagtggtcaaaatccctttcaccatcctcctcttctttctccttcatcgctggtgctccgacaaaaaaaatgctgctgtaatggaccaagagcctgcagggaacagaacagtgaacagcgaggattctgatgaacaagaccatcaggaggtgtcatacgcataattggatcactgtgttttcacacagagaaaaatcactcgcccttctgagaggcccaagacacccccaacagataccagcatgtacatagaacttccaaatgctgagcccagatccaaagttgtcttctgtccacgagcaccacagtcaggccttgaggggatcttctagggaga

SEQ ID NO: 118 - DNA, 1986 bp, Homo sapiens
ataacatcctgtgcgctgctgagctgagctggggcgcagccgcctgtctgcaccggcagcaccatgtcgctcatggtcgtcagcatggcgtgtgttgggttgttcttggtccagagggccggtccacacatgggtggtcaggacaaacccttcctgtctgcctggcccagcgctgtggtgcctcgaggaggacacgtgactcttcggtgtcactatcgtcataggtttaacaatttcatgctatacaaagaagacagaatccacattcccatcttccatggcagaatattccaggagagcttcaacatgagccctgtgaccacagcacatgcagggaactacacatgtcggggttcacacccacactcccccactgggtggtcggcacccagcaaccccgtggtgatcatggtcacaggaaaccacagaaaaccttccctcctggcccacccaggtcccctggtgaaatcaggagagagagtcatcctgcaatgttggtcagatatcatgtttgagcacttctttctgcacaaagaggggatctctaaggacccctcacgcctcgttggacagatccatgatggggtctccaaggccaatttctccatcggtcccatgatgcttgcccttgcagggacctacagatgctacggttctgttactcacaccccctatcagttgtcagctcccagtgatcccctggacatcgtggtcacaggtccatatgagaaaccttctctctcagcccagccgggccccaaggttcaggcaggagagagcgtgaccttgtcctgtagctcccggagctcctatgacatgtaccatctatccagggaggggggagcccatgaacgtaggctccctgcagtgcgcaaggtcaacagaacattccaggcagatttccctctgggccctgccacccacggagggacctacagatgcttcggctctttccgtcactctccctacgagtggtcagacccgagtgacccactgcttgtttctgtcacaggaaacccttcaagtagttggccttcacccacagaaccaagctccaaatctggtaaccccagacacctgcacattctgattgggacctcagtggtcatcatcctcttcatcctcctcctcttctttctccttcatctctggtgctccaacaaaaaaaatgctgctgtaatggaccaagagcctgcagggaacagaacagccaacagcgaggactctgatgaacaagaccctgaggaggtgacatacgcacagttggatcactgcgttttcacacagagaaaaatcactcgcccttctcagaggcccaagacaccccctacagataccatcttgtacacggaacttccaaatgctaagcccagatccaaagttgtctcctgcccatgagcaccacagtcaggccttgaggacgtcttctagggagacaacagccctgtctcaaaaccgagttgccagctcccatgtaccagcagctggaatctgaaggcgtgagtcttcatcttagggcatcgctcctcctcacgccacaaatctggtgcctctctcttgcttacaaatgtctaggtccccactgcctgctggaaagaaaacacactcctttgcttagcccacagttctccatttcacttgacccctgcccacctctccaacctaactggcttacttcctagtctacttgaggctgcaatcacactgaggaactcacaattccaaacatacaagaggctccctcttgacgtggcacttacccacgtgctgttccaccttccctcatgctgtttcacctttcttcggactattttccagccttctgtcagcagtgaaacttataaaattttttgtgatttcaatgtagctgtctcctcttcaaataaacatgtctgccctcaaaaaaaaaaaaaaaaaaaaaaaaaaaaaaaaaaaaaaaaaaaaaaaaaaaaaaaaaaaaaaaaaaaaaaaaaaaaaaaaaaaaaa

SEQ ID NO: 119 - DNA, 1586 bp, Homo sapiens
gctgagctgagctggggcgcggccgcctgtctgcaccggcagcaccatgtcgctcatggtcatcatcatggcgtgtgttgggttcttcttgctgcagggggcctggccacaggagggagtccacagaaaaccttccttcctggccctcccaggtcacctggtgaaatcagaagagacagtcatcctgcaatgttggtcggatgtcatgtttgagcacttccttctgcacagagaggggaagtttaacaacactttgcacctcattggagagcaccatgatggggtttccaaggccaacttctccattggtcccatgatgcctgtccttgcaggaacctacagatgctacggttctgttcctcactccccctatcagttgtcagctcccagtgaccctctggacatggtgatcataggtctatatgagaaaccttctctctcagcccagccgggccccacggttcaggcaggagagaatgtgaccttgtcctgcagctcccggagctcctatgacatgtaccatctatccagggaaggggaggcccatgaacgtaggctccctgcagtgcgcagcatcaacggaacattccaggccgactttcctctgggccctgccacccacggagggacctacagatgcttcggctctttccgtgacgctccctacgagtggtcaaactcgagtgatccactgcttgtttccgtcacaggaaacccttcaaatagttggccttcacccactgaaccaagctccaaaaccggtaaccccagacacctacatgttctgattgggacctcagtggtcaaaatccctttcaccatcctcctcttctttctccttcatcgctggtgctccgacaaaaaaaatgctgctgtaatggaccaagagcctgcagggaacagaacagtgaacagcgaggattctgatgaacaagaccatcaggaggtgtcatacgcataattggatcactgtgttttcacacagagaaaaatcactcgcccttctgagaggcccaagacacccccaacagataccagcatgtacatagaacttccaaatgctgagcccagatccaaagttgtcttctgtccacgagcaccacagtcaggccttgaggggatcttctagggagacaacagccctgtctcaaaaccgggttgccagctcccatgtaccagcagctggaatctgaaggcatcagtcttcatcttagggcatcgctcttcctcacaccacgaatctgaacatgcctctctcttgcttacaaatgtctaaggtccccactgcctgctggagagaaaacacactcctttgcttagcccacaattctccatttcacttgacccctgcccacctctccaacctaactggcttacttcctagtctacctgaggctgcaatcacactgaggaactcacaattccaaacatacaagaggctgcctcttaacacagcacttagacacgtgctgttccacctcccttcagactatctttcagccttctgccagcagtaaaacttataaattttttaaataatttcaatgtagttttcccgccttcaaataaacatgtctgccctcatg

SEQ ID NO: 120 - DNA, 1596 bp, Homo sapiens
ctgtgcgctgctgagctgagctggggcgcggccgcctgtctgcaccggcagcaccatgtcgctcatggtcatcagcatggcgtgtgttgggttcttcttgctgcagggggcctggacacatgagggtggtcaggacaagcccttgctgtctgcctggcccagcgctgtggtgcctcgaggaggacatgtgactcttctgtgtcgctctcgtcttgggtttaccatcttcagtctgtacaaagaagatggggtgcctgtccctgagctctacaacaaaatattctggaagagcatcctcatgggccctgtgacccctgcacacgcagggacctacagatgtcggggttcacacccacgctcccccattgagtggtcagcacccagcaaccccctggtgatcgtggtcacaggtctatttgggaaaccttcactctcagcccagccgggccccacggttcgcacaggagagaacgtgaccttgtcctgcagctccaggagctcatttgacatgtaccatctatccagggaggggagggcccatgaacctaggctccctgcagtgcccagcgtcaatggaacattccaggctgactttcctctgggccctgccacccacggagggacctacacatgcttcggctctctccatgactcaccctatgagtggtcagacccgagtgacccactgcttgtttctgtcacaggaaactcttcaagtagttcatcttcacccactgaaccaagctccaaaactggtatccgcagacacctgcacattctgattgggacctcagtggctatcatcctcttcatcatcctcttcttctttctccttcattgctgctgctccaacaaaaagaatgctgctgtaatggaccaagagcctgccggggacagaacagtgaacagggaggactctgatgatcaagaccctcaggaggtgacatatgcacagttggatcactgcgttttcacacagacaaaaatcacttccccttctcagaggcccaagacacctccaacagataccaccatgtacatggaacttccaaatgctaagccaagatcattgtctcctgcccataagcaccacagtcaggccttgaggggatcttctagggagacaacagccctgtctcaaaaccgggttgctagctcccatgtaccagcagctggaatctgaaggcatcagtcttcatcttaggggatcgctcttcctcacaccacaaatctgaacatgcctctctcttgcttacaaatgtctaaggtccccactgcctgctggagagaagacacactcctttgcttagcccacaattctctatttcacttgacccctgcccacctctccaactgaactggcttacttcctagtctacttgaggctgcaatcacactgaggaactcacaattccagacatacaagaggctccctcttaacatggcactgagacacgtgctgttccaccttccctcatgctgtttcacctttcctcagactattttccagccttctgtcagtcagcagtgaaacttataaaattttttgtgatttcaatgtagctgtctccttttcaaataaacatgtctgccctc

SEQ ID NO: 121 - DNA, 1609 bp, Homo sapiens
tcgagccgagtcactgcgtcctggcagcagaagctgcaccatgtccatgtcacccacggtcatcatcctggcatgtcttgggttcttcttggaccagagtgtgtgggcacacgtgggtggtcaggacaagcccttctgctctgcctggcccagcgctgtggtgcctcaaggaggacacgtgactcttcggtgtcactatcgtcgtgggtttaacatcttcacgctgtacaagaaagatggggtccctgtccctgagctctacaacagaatattctggaacagtttcctcattagccctgtgaccccagcacacgcagggacctacagatgtcgaggttttcacccgcactcccccactgagtggtcggcacccagcaaccccctggtgatcatggtcacaggtctatatgagaaaccttcgcttacagcccggccgggccccacggttcgcgcaggagagaacgtgaccttgtcctgcagctcccagagctcctttgacatctaccatctatccagggagggggaagcccatgaacttaggctccctgcagtgcccagcatcaatggaacattccaggccgacttccctctgggtcctgccacccacggagagacctacagatgcttcggctctttccatggatctccctacgagtggtcagacccgagtgacccactgcctgtttctgtcacaggaaacccttctagtagttggccttcacccactgaaccaagcttcaaaactggtatcgccagacacctgcatgctgtgattaggtactcagtggccatcatcctctttaccatccttcccttctttctccttcatcgctggtgctccaaaaaaaaaatgctgctgtaatgaaccaagagcctgcgggacacagaacagtgaacagggaggactctgatgaacaagaccctcaggaggtgacatacgcacagttggatcactgcattttcacacagagaaaaatcactggcccttctcagaggagcaagagaccctcaacagataccagcgtgtgtatagaacttccaaatgctgagcccagagcgttgtctcctgcccatgagcaccacagtcaggccttgatgggatcttctagggagacaacagccctgtctcaaacccagcttgccagctctaatgtaccagcagctggaatctgaaggcgtgagtctccatcttagagcatcactcttcctcacaccacaaatctggtgcctgtctcttgcttaccaatgtctaaggtccccactgcctgctgcagagaaaacacactcctttgcttagcccacaattctctatttcacttgacccctgcccacctctccaacctaactggcttacttcctagtctacttgaggctgcaatcacactgaggaactcacaattccaaacatacaagaggctctctcttaacacggcacttagacacgtgctgttccaccttccctcgtgctgttccacctttcctcagactatttttcagccttctggcatcagcaaaccttataaaatttttttgatttcagtgtagttctctcctcttcaaataaacatgtctgccttcaaaaaaaaaaaaaaaaaaaaaaaaaaaaaaa

SEQ ID NO: 122 - DNA, 1610 bp, Homo sapiens
tcgagccgagtcactgcgtcctggcagcagaagctgcaccatgtccatgtcacccacggtcatcatcctggcatgtcttgggttcttcttggaccagagtgtgtgggcacacgtgggtggtcaggacaagcccttctgctctgcctggcccagcgctgtggtgcctcaaggaggacacgtgactcttcggtgtcactatcgtcgtgggtttaacatcttcacgctgtacaagaaagatggggtccctgtccctgagctctacaacagaatattctggaacagtttcctcattagccctgtgaccccagcacacgcagggacctacagatgtcgaggttttcacccgcactcccccactgagtggtcggcacccagcaaccccctggtgatcatggtcacaggtctatatgagaaaccttcgcttacagcccggccgggccccacggttcgcgcaggagagaacgtgaccttgtcctgcagctcccagagctcctttgacatctaccatctatccagggagggggaagcccatgaacttaggctccctgcagtgcccagcatcaatggaacattccaggccgacttccctctgggtcctgccacccacggagagacctacagatgcttcggctctttccatggatctccctacgagtggtcagacccgagtgacccactgcctgtttctgtcacaggaaacccttctagtagttggccttcacccactgaaccaagcttcaaaactggtatcgccagacacctgcatgctgtgattaggtactcagtggccatcatcctctttaccatccttcccttctttctccttcatcgctggtgctccaaaaaaaaaaatgctgctgtaatgaaccaagagcctgcgggacacagaacagtgaacagggaggactctgatgaacaagaccctcaggaggtgacatacgcacagttggatcactgcattttcacacagagaaaaatcactggcccttctcagaggagcaagagaccctcaacagataccagcgtgtgtatagaacttccaaatgctgagcccagagcgttgtctcctgcccatgagcaccacagtcaggccttgatgggatcttctagggagacaacagccctgtctcaaacccagcttgccagctctaatgtaccagcagctggaatctgaaggcgtgagtctccatcttagagcatcactcttcctcacaccacaaatctggtgcctgtctcttgcttaccaatgtctaaggtccccactgcctgctgcagagaaaacacactcctttgcttagcccacaattctctatttcacttgacccctgcccacctctccaacctaactggcttacttcctagtctacttgaggctgcaatcacactgaggaactcacaattccaaacatacaagaggctctctcttaacacggcacttagacacgtgctgttccaccttccctcgtgctgttccacctttcctcagactatttttcagccttctggcatcagcaaaccttataaaatttttttgatttcagtgtagttctctcctcttcaaataaacatgtctgccttcaaaaaaaaaaaaaaaaaaaaaaaaaaaaaaa

SEQ ID NO: 123 - DNA, 1741 bp, Homo sapiens
ccggcagcaccatgttgctcatggtcgtcagcatggcgtgtgttgggttgttcttggtccagagggccggtccacacatgggtggtcaggacaagcccttcctgtctgcctggcccagcgctgtggtgcctcgcggaggacacgtgactcttcggtgtcactatcgtcataggtttaacaatttcatgctatacaaagaagacagaatccacgttcccatcttccatggcagaatattccaggagggcttcaacatgagccctgtgaccacagcacatgcagggaactacacatgtcggggttcacacccacactcccccactgggtggtcggcacccagcaaccccatggtgatcatggtcacaggaaaccacagaaaaccttccctcctggcccacccaggtcccctggtgaaatcaggagagagagtcatcctgcaatgttggtcagatatcatgtttgagcacttctttctgcacaaagagtggatctctaaggacccctcacgcctcgttggacagatccatgatggggtctccaaggccaatttctccatcggttccatgatgcgtgcccttgcagggacctacagatgctacggttctgttactcacaccccctatcagttgtcagctcccagtgatcccctggacatcgtggtcacaggtctatatgagaaaccttctctctcagcccagccgggccccaaggttcaggcaggagagagcgtgaccttgtcctgtagctcccggagctcctatgacatgtaccatctatccagggaggggggagcccatgaacgtaggctccctgcagtgcgcaaggtcaacagaacattccaggcagatttccctctgggccctgccacccacggagggacctacagatgcttcggctctttccgtcactctccctacgagtggtcagacccgagtgacccactgcttgtttctgtcacaggaaacccttcaagtagttggccttcacccacagaaccaagctccaaatctggtaacctcagacacctgcacattctgattgggacctcagtggtcaaaatccctttcaccatcctcctcttctttctccttcatcgctggtgctccaacaaaaaaaaatgctgctgtaatggaccaagagcctgcagggaacagaagtgaacagcgaggattctgatgaacaagaccatcaggaggtgtcatacgcataattggaacactgtgttttcacacagagaaaaatcactcgcccttctcagaggcccaagacacccccaacagataccagcatgtacatagaacttccaaatgctgagcccagatccaaagttgtcttctgtccacgagcaccacagtcaggccttgaggggatcttctagggagacaacagccctgtctcaaaactgggttgccagctcccatgtaccagcagctggaatctgaaggcatcagtcttcatcttagggcatcgctcttcctcacaccacaaatctgaatgtgcctctcacttgcttacaaatgtctaaggtccccactgcctgctggagaaaaaacacactcctttgcttagcccacagttctccatttcacttgacccctgcccacctctccaacctaactggcttacttcctagtctacttgaggctgcaatcacactgaggaactcacaattccacacatacaagaggctccgtcttaacgcagcacttagacacgtgctgttccaccttccctcatgctg

SEQ ID NO: 124 - DNA, 1632 bp, Homo sapiens
atgtcgctcatggtcatcagcatggcgtgtgttgggttcttcttgctgcagggggcctggacacatgagggtggacaggacaagcccttgctgtctgcctggcccagcgctgtggtgcctcgaggaggacatgtgactcttctgtgtcgctctcgtcttgggtttaccatcttcagtctgtacaaagaagatggggtgcctgtccctgagctctacaacaaaatattctggaagagcatcctcatgggccctgtgacccctgcacacgcagggacctacagatgtcggggttcacacccgcgctcccccattgagtggtcggcacccagcaaccccctggtgatcgtggtcacaggtctatttgggaaaccttcactctcagcccagccgggccccacggttcgcacaggagagaacgtggccttgtcctgcagctccaggagctcatttgacatgtaccatctatccagggaggggagggcccatgaacctaggctccctgcagtgcccagcgtcgatggaacattccaggctgactttcctctgggccctgccacccacggagggacctacacatgcttcagctctctccatgactcaccctatgagtggtcagacccgagtgacccactgcttgtttctgtcacaggaaactcttcaagtagttcatcttcacccactgaaccaagctccaaaactggtatccgcagacacctgcacattctgattgggacctcagtggctatcatcctcttcatcatcctcttcttctttctccttcattgctgctgctccaacaaaaagaatgctgctgtaatggaccaagggcctgccggggacagaacagtgaacagggaggactctgatgatcaagaccctcaggaggtgacatatgcacagttggatcactgcgttttcacacagacaaaaatcacttccccttctcagaggcccaaggcacctccaacagataccaccatgtacatggaacttccaaatgctaagccaagatcattgtctcctgcccataagcaccacagtcaggccttgaggggatcttctagggagacaacagccctgtctcaaaaccgggttgctagctcccatgtaccagcagctggaatctgaaggcatcagtcttcatcttaggggatcgctcttcctcacaccacaaatctgaacatgcctctctcttgcttacaaatgtctaaggtccccactgcctgctggagagaagacacacacctttgcttagcccacaattctctatttcacttgacccctgcccacctctccaactgaactggcttacttcctagtctacttgaggctgcaatcacactgaggaactcacaattccagacatacaagaggctccctcttaacatggcactgagacacgtgctgttccaccctccctcatgctgtttcacctttcctcagactattttccagccttctgtcagtcagcagtgaaacttataaaattttttgtgatttcaatgtagctgtctccttttcaaataaacatgtctgccctcattgctttaggtaatgtgacactattcgctgaaagaaaccgctgttatcattaccatgtccacataaccccatctgttatccactgggttc

SEQ ID NO: 125 - DNA, 1834 bp, Homo sapiens
ggggcgcggcctcctgtctgcaccggcagcaccatgtcgctcacggtcgtcagcatggcgtgcgttgggttcttcttgctgcagggggcctggccactcatgggtggtcaggacaaacccttcctgtctgcccggcccagcactgtggtgcctcgaggaggacacgtggctcttcagtgtcactatcgtcgtgggtttaacaatttcatgctgtacaaagaagacagaagccacgttcccatcttccacggcagaatattccaggagagcttcatcatgggccctgtgaccccagcacatgcagggacctacagatgtcggggttcacgcccacactccctcactgggtggtcggcacccagcaaccccctggtgatcatggtcacaggaaaccacagaaaaccttccctcctggcccacccagggcccctgctgaaatcaggagagacagtcatcctgcaatgttggtcagatgtcatgtttgagcacttctttctgcacagagaggggatctctgaggacccctcacgcctcgttggacagatccatgatggggtctccaaggccaacttctccatcggtcccttgatgcctgtccttgcaggaacctacagatgttatggttctgttcctcactccccctatcagttgtcagctcccagtgaccccctggacatcgtgatcacaggtctatatgagaaaccttctctctcagcccagccgggccccacggttcaggcaggagagaacgtgaccttgtcctgtagctcctggagctcctatgacatctaccatctgtccagggaaggggaggcccatgaacgtaggctccgtgcagtgcccaaggtcaacagaacattccaggcagactttcctctgggccctgccacccacggagggacctacagatgcttcggctctttccgtgccctgccctgcgtgtggtcaaactcaagtgacccactgcttgtttctgtcacaggtatctgcagacacctgcatgttctgattgggacctcagtggtcatcttcctcttcatcctcctcctcttctttctcctttatcgctggtgctccaacaaaaagaatgctgctgtaatggaccaagagcctgcgggggacagaacagtgaataggcaggactctgatgaacaagaccctcaggaggtgacgtacgcacagttggatcactgcgttttcatacagagaaaaatcagtcgcccttctcagaggcccaagacacccctaacagataccagcgtgtacacggaacttccaaatgctgagcccagatccaaagttgtctcctgcccacgagcaccacagtcaggtcttgagggggttttctagggagacaacagccctgtctcaaaaccaggttgccagatccaatgaaccagcagctggaatctgaaggcatcagtctgcatcttaggggatcgctcttcctcacaccacgaatctgaacatgcctctctcttgcttacaaatgcctaaggtcgccactgcctgctgcagagaaaacacactcctttgcttagcccacaagtatctatttcacttgacccctgcccacctctccaacctaactggcttacttcctagtcctacttgaggctgcaatcacactgaggaactcacaattccaaacatacaagaggctccctcttaacacggcacttacacacttgctgttccaccttccctcatgctgttccacctcccctcagactatctttcagccttctgtcatcagtaaaatttataaattttttttataacttcagtgtagctctctcctcttcaaataaacatgtctgccctcatggtttcg

SEQ ID NO: 126 - DNA, 1113 bp, Homo sapiens
ccggcagcaccatgtcgctcatggtcatcagcatggcatgtgttgggttcttctggctgcagggggcctggccacatgagggattccgcagaaaaccttccctcctggcccacccaggtcgcctggtgaaatcagaagagacagtcatcctgcaatgttggtcagatgtcatgtttgagcacttccttctgcacagagaggggacgtttaacgacactttgcgcctcattggagagcacattgatggggtctccaaggccaacttctccatcggtcgcatgaggcaagacctggcagggacctacagatgctacggttctgttcctcactccccctatcagttttcagctcccagtgaccctctggacatcgtgatcacaggtctatatgagaaaccttctctctcagcccagccgggccccacggttctggcaggagagagcgtgaccttgtcctgcagctcctggagctcctatgacatgtaccatctatccacggagggggaggcccatgaacgtaggttctctgcagggcccaaggtcaacggaacattccaggccgactttcctctgggccctgccacccaaggaggaacctacagatgcttcggctctttccatgactctccctacgagtggtcaaagtcaagtgacccactgcttgtttctgtcacaggaaacccttcaaatagttggccttcacccactgaaccaagctccaaaaccggtaaccccagacacctacacgttctgattgggacctcagtggtcaaactccctttcaccatcctcctcttctttctccttcatcgctggtgctccgacaaaaaaaatgcatctgtaatggaccaagggcctgcggggaacagaacagtgaacagggaggattctgacgaacaggaccatcaggaggtgtcatacgcataattggatcactgtgttttcacacagagaaaaatcactcccccttctcagaggcccaagacacccccaacagatagcagcatgtacatagaacttccaaatgctgagtccagatccaaagctgtcttctgtccacgagcaccacagtcaggccttgaggggatcttctagggagacaacagccctgtct

SEQ ID NO: 127 - protein, 44 aa, Homo sapiens
MSDKPDMAEIEKFDKSKLKKTETQEKNPLPSKETIEQEKQAGES

SEQ ID NO: 128 - protein, 44 aa, Homo sapiens
MSDKPGMAEIEKFDKSKLKKTETQEKNPLSSKETIEQERQAGES

SEQ ID NO: 129 - protein, 420 aa, Homo sapiens
MSERKEGRGKGKGKKKERGSGKKPESAAGSQSPALPPRLKEMKSQESAAGSKLVLRCETSSEYSSLRFKWFKNGNELNRKNKPQNIKIQKKPGKSELRINKASLADSGEYMCKVISKLGNDSASANITIVESNEIITGMPASTEGAYVSSESPIRISVSTEGANTSSSTSTSTTGTSHLVKCAEKEKTFCVNGGECFMVKDLSNPSRYLCKCPNEFTGDRCQNYVMASFYKAEELYQKRVLTITGICIALLVVGIMCVVAYCKTKKQRKKLHDRLRQSLRSERNNMMNIANGPHHPNPPPENVQLVNQYVSKNVISSEHIVEREAETSFSTSHYTSTAHHSTTVTQTPSHSWSNGHTESILSESHSVIVMSSVENSRHSSPTGGPRGRLNGTGGPRECNSFLRHARETPDSYRDSPHSER

SEQ ID NO: 130 - protein, 207 aa, Homo sapiens
MSERKEGRGKGKGKKKERGSGKKPESAAGSQSPALPPRLKEMKSQESAAGSKLVLRCETSSEYSSLRFKWFKNGNELNRKNKPQNIKIQKKPGKSELRINKASLADSGEYMCKVISKLGNDSASANITIVESNATSTSTTGTSHLVKCAEKEKTFCVNGGECFMVKDLSNPSRYLCKCPNEFTGDRCQNYVMASFYSTSTPFLSLPE

SEQ ID NO: 131 - protein, 194 aa, Homo sapiens
MSERKEGRGKGKGKKKERGSGKKPESAAGSQSPALPPRLKEMKSQESAAGSKLVLRCETSSEYSSLRFKWFKNGNELNRKNKPQNIKIQKKPGKSELRINKASLADSGEYMCKVISKLGNDSASANITIVESNEIITGMPASTEGAYVSSATSTSTTGTSHLVKCAEKEKTFCVNGGECFMVKDLSNPSRYLCK

SEQ ID NO: 132 - protein, 624 aa, Homo sapiens
MGKGRAGRVGTTALPPRLKEMKSQESAAGSKLVLRCETSSEYSSLRFKWFKNGNELNRKNKPQNIKIQKKPGKSELRINKASLADSGEYMCKVISKLGNDSASANITIVESNEIITGMPASTEGAYVSSESPIRISVSTEGANTSSSTSTSTTGTSHLVKCAEKEKTFCVNGGECFMVKDLSNPSRYLCKCPNEFTGDRCQNYVMASFYKHLGIEFMEAEELYQKRVLTITGICIALLVVGIMCVVAYCKTKKQRKKLHDRLRQSLRSERNNMMNIANGPHHPNPPPENVQLVNQYVSKNVISSEHIVEREAETSFSTSHYTSTAHHSTTVTQTPSHSWSNGHTESILSESHSVIVMSSVENSRHSSPTGGPRGRLNGTGGPRECNSFLRHARETPDSYRDSPHSERYVSAMTTPARMSPVDFHTPSSPKSPPSEMSPPVSSMTVSMPSMAVSPFMEEERPLLLVTPPRLREKKFDHHPQQFSSFHHNPAHDSNSLPASPLRIVEDEEYETTQEYEPAQEPVKKLANSRRAKRTKPNGHIANRLEVDSNTSSQSSNSESETEDERVGEDTPFLGIQNPLAASLEATPAFRLADSRTNPAGRFSTQEEIQARLSSVIANQDPIAV

SEQ ID NO: 133 - protein, 607 aa, Homo sapiens
MGKGRAGRVGTTALPPRLKEMKSQESAAGSKLVLRCETSSEYSSLRFKWFKNGNELNRKNKPQNIKIQKKPGKSELRINKASLADSGEYMCKVISKLGNDSASANITIVESNEIITGMPASTEGAYVSSATSTSTTGTSHLVKCAEKEKTFCVNGGECFMVKDLSNPSRYLCKCPNEFTGDRCQNYVMASFYKHLGIEFMEAEELYQKRVLTITGICIALLVVGIMCVVAYCKTKKQRKKLHDRLRQSLRSERNNMMNIANGPHHPNPPPENVQLVNQYVSKNVISSEHIVEREAETSFSTSHYTSTAHHSTTVTQTPSHSWSNGHTESILSESHSVIVMSSVENSRHSSPTGGPRGRLNGTGGPRECNSFLRHARETPDSYRDSPHSERYVSAMTTPARMSPVDFHTPSSPKSPPSEMSPPVSSMTVSMPSMAVSPFMEEERPLLLVTPPRLREKKFDHHPQQFSSFHHNPAHDSNSLPASPLRIVEDEEYETTQEYEPAQEPVKKLANSRRAKRTKPNGHIANRLEVDSNTSSQSSNSESETEDERVGEDTPFLGIQNPLAASLEATPAFRLADSRTNPAGRFSTQEEIQARLSSVIANQDPIAV

SEQ ID NO: 134 - protein, 607 aa, Homo sapiens; identical to SEQ ID NO: 133

SEQ ID NO: 135 - protein, 637 aa, Homo sapiens
MSERKEGRGKGKGKKKERGSGKKPESAAGSQSPALPPRLKEMKSQESAAGSKLVLRCETSSEYSSLRFKWFKNGNELNRKNKPQNIKIQKKPGKSELRINKASLADSGEYMCKVISKLGNDSASANITIVESNEIITGMPASTEGAYVSSESPIRISVSTEGANTSSSTSTSTTGTSHLVKCAEKEKTFCVNGGECFMVKDLSNPSRYLCKCPNEFTGDRCQNYVMASFYKAEELYQKRVLTITGICIALLVVGIMCVVAYCKTKKQRKKLHDRLRQSLRSERNNMMNIANGPHHPNPPPENVQLVNQYVSKNVISSEHIVEREAETSFSTSHYTSTAHHSTTVTQTPSHSWSNGHTESILSESHSVIVMSSVENSRHSSPTGGPRGRLNGTGGPRECNSFLRHARETPDSYRDSPHSERYVSAMTTPARMSPVDFHTPSSPKSPPSEMSPPVSSMTVSMPSMAVSPFMEEERPLLLVTPPRLREKKFDHHPQQFSSFHHNPAHDSNSLPASPLRIVEDEEYETTQEYEPAQEPVKKLANSRRAKRTKPNGHIANRLEVDSNTSSQSSNSESETEDERVGEDTPFLGIQNPLAASLEATPAFRLADSRTNPAGRFSTQEEIQARLSSVIANQDPIAV

SEQ ID NO: 136 - protein, 637 aa, Homo sapiens; identical to SEQ ID NO: 135

SEQ ID NO: 137 - protein, 211 aa, Homo sapiens
MSERKEGRGKGKGKKKERGSGKKPESAAGSQSPALPPRLKEMKSQESAAGSKLVLRCETSSEYSSLRFKWFKNGNELNRKNKPQNIKIQKKPGKSELRINKASLADSGEYMCKVISKLGNDSASANITIVESNEIITGMPASTEGAYVSSESPIRISVSTEGANTSSSTSTSTTGTSHLVKCAEKEKTFCVNGGECFMVKDLSNPSRYLCK

SEQ ID NO: 138 - protein, 296 aa, Homo sapiens
MEIYSPDMSEVAAERSSSPSTQLSADPSLDGLPAAEDMPEPQTEDGRTPGLVGLAVPCCACLEAERLRGCLNSEKICIVPILACLVSLCLCIAGLKWVFVDKIFEYDSPTHLDPGGLGQDPIISLDATAASAVWVSSEAYTSPVSRAQSESEVQVTVQGDKAVVSFEPSAAPTPKNRIFAFSFLPSTAPSFPSPTRNPEVRTPKSATQPQTTETNLQTAPKLSTSTSTTGTSHLVKCAEKEKTFCVNGGECFMVKDLSNPSRYLCKCPNEFTGDRCQNYVMASFYSTSTPFLSLPE

SEQ ID NO: 139 - protein, 422 aa, Homo sapiens
MRWRRAPRRSGRPGPRAQRPGSAARSSPPLPLLPLLLLLGTAALAPGAAAGNEAAPAGASVCYSSPPSVGSVQELAQRAAVVIEGKVHPQRRQQGALDRKAAAAAGEAGAWGGDREPPAAGPRALGPPAEEPLLAANGTVPSWPTAPVPSAGEPGEEAPYLVKVHQVWAVKAGGLKKDSLLTVRLGTWGHPAFPSCGRLKEDSRYIFFMEPDANSTSRAPAAFRASFPPLETGRNLKKEVSRVLCKRCALPPRLKEMKSQESAAGSKLVLRCETSSEYSSLRFKWFKNGNELNRKNKPQNIKIQKKPGKSELRINKASLADSGEYMCKVISKLGNDSASANITIVESNATSTSTTGTSHLVKCAEKEKTFCVNGGECFMVKDLSNPSRYLCKCPNEFTGDRCQNYVMASFYSTSTPFLSLPE

SEQ ID NO: 140 - protein, 177 aa, Homo sapiens
MSERKEGRGKGKGKKKERGSGKKPESAAGSQSPALPPRLKEMKSQESAAGSKLVLRCETSSEYSSLRFKWFKNGNELNRKNKPQNIKIQKKPGKSELRINKASLADSGEYMCKVISKLGNDSASANITIVESNATSTSTTGTSHLVKCAEKEKTFCVNGGECFMVKDLSNPSRYLCK

SEQ ID NO: 141 - protein, 459 aa, Homo sapiens
MSERKEGRGKGKGKKKERGSGKKPESAAGSQSPALPPRLKEMKSQESAAGSKLVLRCETSSEYSSLRFKWFKNGNELNRKNKPQNIKIQKKPGKSELRINKASLADSGEYMCKVISKLGNDSASANITIVESNEIITGMPASTEGAYVSSESPIRISVSTEGANTSSSTSTSTTGTSHLVKCAEKEKTFCVNGGECFMVKDLSNPSRYLCKCPNEFTGDRCQNYVMASFYKAEELYQKRVLTITGICIALLVVGIMCVVAYCKTKKQRKKLHDRLRQSLRSERNNMMNIANGPHHPNPPPENVQLVNQYVSKNVISSEHIVEREAETSFSTSHYTSTAHHSTTVTQTPSHSWSNGHTESILSESHSVIVMSSVENSRHSSPTGGPRGRLNGTGGPRECNSFLRHARETPDSYRDSPHSERHNLIAELRRNKAHRSKCMQIQLSATHLRSSSIPHLGFIL

SEQ ID NO: 142 - protein, 590 aa, Homo sapiens
MGKGRAGRVGTTALPPRLKEMKSQESAAGSKLVLRCETSSEYSSLRFKWFKNGNELNRKNKPQNIKIQKKPGKSELRINKASLADSGEYMCKVISKLGNDSASANITIVESNATSTSTTGTSHLVKCAEKEKTFCVNGGECFMVKDLSNPSRYLCKCPNEFTGDRCQNYVMASFYKHLGIEFMEAEELYQKRVLTITGICIALLVVGIMCVVAYCKTKKQRKKLHDRLRQSLRSERNNMMNIANGPHHPNPPPENVQLVNQYVSKNVISSEHIVEREAETSFSTSHYTSTAHHSTTVTQTPSHSWSNGHTESILSESHSVIVMSSVENSRHSSPTGGPRGRLNGTGGPRECNSFLRHARETPDSYRDSPHSERYVSAMTTPARMSPVDFHTPSSPKSPPSEMSPPVSSMTVSMPSMAVSPFMEEERPLLLVTPPRLREKKFDHHPQQFSSFHHNPAHDSNSLPASPLRIVEDEEYETTQEYEPAQEPVKKLANSRRAKRTKPNGHIANRLEVDSNTSSQSSNSESETEDERVGEDTPFLGIQNPLAASLEATPAFRLADSRTNPAGRFSTQEEIQARLSSVIANQDPIAV

SEQ ID NO: 143 - protein, 308 aa, Homo sapiens
MQIPKHISIEDITATSTSTTGTSHLVKCAEKEKTFCVNGGECFMVKDLSNPSRYLCKCQPGFTGARCTENVPMKVQNQEKAEELYQKRVLTITGICIALLVVGIMCVVAYCKTKKQRKKLHDRLRQSLRSERNNMMNIANGPHHPNPPPENVQLVNQYVSKNVISSEHIVEREAETSFSTSHYTSTAHHSTTVTQTPSHSWSNGHTESILSESHSVIVMSSVENSRHSSPTGGPRGRLNGTGGPRECNSFLRHARETPDSYRDSPHSERHNLIAELRRNKAHRSKCMQIQLSATHLRSSSIPHLGFIL

SEQ ID NO: 144 - protein, 241 aa, Homo sapiens
MSERKEGRGKGKGKKKERGSGKKPESAAGSQSPALPPRLKEMKSQESAAGSKLVLRCETSSEYSSLRFKWFKNGNELNRKNKPQNIKIQKKPGKSELRINKASLADSGEYMCKVISKLGNDSASANITIVESNEIITGMPASTEGAYVSSESPIRISVSTEGANTSSSTSTSTTGTSHLVKCAEKEKTFCVNGGECFMVKDLSNPSRYLCKCPNEFTGDRCQNYVMASFYSTSTPFLSLPE

SEQ ID NO: 145 - protein, 645 aa, Homo sapiens
MSERKEGRGKGKGKKKERGSGKKPESAAGSQSPALPPRLKEMKSQESAAGSKLVLRCETSSEYSSLRFKWFKNGNELNRKNKPQNIKIQKKPGKSELRINKASLADSGEYMCKVISKLGNDSASANITIVESNEIITGMPASTEGAYVSSESPIRISVSTEGANTSSSTSTSTTGTSHLVKCAEKEKTFCVNGGECFMVKDLSNPSRYLCKCPNEFTGDRCQNYVMASFYKHLGIEFMEAEELYQKRVLTITGICIALLVVGIMCVVAYCKTKKQRKKLHDRLRQSLRSERNNMMNIANGPHHPNPPPENVQLVNQYVSKNVISSEHIVEREAETSFSTSHYTSTAHHSTTVTQTPSHSWSNGHTESILSESHSVIVMSSVENSRHSSPTGGPRGRLNGTGGPRECNSFLRHARETPDSYRDSPHSERYVSAMTTPARMSPVDFHTPSSPKSPPSEMSPPVSSMTVSMPSMAVSPFMEEERPLLLVTPPRLREKKFDHHPQQFSSFHHNPAHDSNSLPASPLRIVEDEEYETTQEYEPAQEPVKKLANSRRAKRTKPNGHIANRLEVDSNTSSQSSNSESETEDERVGEDTPFLGIQNPLAASLEATPAFRLADSRTNPAGRFSTQEEIQARLSSVIANQDPIAV

SEQ ID NO: 146 - protein, 640 aa, Homo sapiens
MSERKEGRGKGKGKKKERGSGKKPESAAGSQSPALPPRLKEMKSQESAAGSKLVLRCETSSEYSSLRFKWFKNGNELNRKNKPQNIKIQKKPGKSELRINKASLADSGEYMCKVISKLGNDSASANITIVESNEIITGMPASTEGAYVSSESPIRISVSTEGANTSSSTSTSTTGTSHLVKCAEKEKTFCVNGGECFMVKDLSNPSRYLCKCQPGFTGARCTENVPMKVQNQEKAEELYQKRVLTITGICIALLVVGIMCVVAYCKTKKQRKKLHDRLRQSLRSERNNMMNIANGPHHPNPPPENVQLVNQYVSKNVISSEHIVEREAETSFSTSHYTSTAHHSTTVTQTPSHSWSNGHTESILSESHSVIVMSSVENSRHSSPTGGPRGRLNGTGGPRECNSFLRHARETPDSYRDSPHSERYVSAMTTPARMSPVDFHTPSSPKSPPSEMSPPVSSMTVSMPSMAVSPFMEEERPLLLVTPPRLREKKFDHHPQQFSSFHHNPAHDSNSLPASPLRIVEDEEYETTQEYEPAQEPVKKLANSRRAKRTKPNGHIANRLEVDSNTSSQSSNSESETEDERVGEDTPFLGIQNPLAASLEATPAFRLADSRTNPAGRFSTQEEIQARLSSVIANQDPIAV

SEQ ID NO: 147 - protein, 462 aa, Homo sapiens
MSERKEGRGKGKGKKKERGSGKKPESAAGSQSPALPPRLKEMKSQESAAGSKLVLRCETSSEYSSLRFKWFKNGNELNRKNKPQNIKIQKKPGKSELRINKASLADSGEYMCKVISKLGNDSASANITIVESNEIITGMPASTEGAYVSSESPIRISVSTEGANTSSSTSTSTTGTSHLVKCAEKEKTFCVNGGECFMVKDLSNPSRYLCKCQPGFTGARCTENVPMKVQNQEKAEELYQKRVLTITGICIALLVVGIMCVVAYCKTKKQRKKLHDRLRQSLRSERNNMMNIANGPHHPNPPPENVQLVNQYVSKNVISSEHIVEREAETSFSTSHYTSTAHHSTTVTQTPSHSWSNGHTESILSESHSVIVMSSVENSRHSSPTGGPRGRLNGTGGPRECNSFLRHARETPDSYRDSPHSERHNLIAELRRNKAHRSKCMQIQLSATHLRSSSIPHLGFIL

SEQ ID NO: 148 - protein, 232 aa, Homo sapiens
MNFLLSWVHWSLALLLYLHHAKWSQAAPMAEGGGQNHHEVVKFMDVYQRSYCHPIETLVDIFQEYPDEIEYIFKPSCVPLMRCGGCCNDEGLECVPTEESNITMQIMRIKPHQGQHIGEMSFLQHNKCECRPKKDRARQEKKSVRGKGKGQKRKRKKSRYKSWSVYVGARCCLMPWSLPGPHPCGPCSERRKHLFVQDPQTCKCSCKNTDSRCKARQLELNERTCRCDKPRR

SEQ ID NO: 149 - protein, 412 aa, Homo sapiens
MTDRQTDTAPSPSYHLLPGRRRTVDAAASRGQGPEPAPGGGVEGVGARGVALKLFVQLLGCSRFGGAVVRAGEAEPSGAARSASSGREEPQPEEGEEEEEKEEERGPQWRLGARKPGSWTGEAAVCADSAPAARAPQALARASGRGGRVARRGAEESGPPHSPSRRGSASRAGPGRASETMNFLLSWVHWSLALLLYLHHAKWSQAAPMAEGGGQNHHEVVKFMDVYQRSYCHPIETLVDIFQEYPDEIEYIFKPSCVPLMRCGGCCNDEGLECVPTEESNITMQIMRIKPHQGQHIGEMSFLQHNKCECRPKKDRARQEKKSVRGKGKGQKRKRKKSRYKSWSVYVGARCCLMPWSLPGPHPCGPCSERRKHLFVQDPQTCKCSCKNTDSRCKARQLELNERTCRCDKPRR

SEQ ID NO: 150 - protein, 215 aa, Homo sapiens
MNFLLSWVHWSLALLLYLHHAKWSQAAPMAEGGGQNHHEVVKFMDVYQRSYCHPIETLVDIFQEYPDEIEYIFKPSCVPLMRCGGCCNDEGLECVPTEESNITMQIMRIKPHQGQHIGEMSFLQHNKCECRPKKDRARQEKKSVRGKGKGQKRKRKKSRYKSWSVPCGPCSERRKHLFVQDPQTCKCSCKNTDSRCKARQLELNERTCRCDKPRR

SEQ ID NO: 151 - protein, 395 aa, Homo sapiens
MTDRQTDTAPSPSYHLLPGRRRTVDAAASRGQGPEPAPGGGVEGVGARGVALKLFVQLLGCSRFGGAVVRAGEAEPSGAARSASSGREEPQPEEGEEEEEKEEERGPQWRLGARKPGSWTGEAAVCADSAPAARAPQALARASGRGGRVARRGAEESGPPHSPSRRGSASRAGPGRASETMNFLLSWVHWSLALLLYLHHAKWSQAAPMAEGGGQNHHEVVKFMDVYQRSYCHPIETLVDIFQEYPDEIEYIFKPSCVPLMRCGGCCNDEGLECVPTEESNITMQIMRIKPHQGQHIGEMSFLQHNKCECRPKKDRARQEKKSVRGKGKGQKRKRKKSRYKSWSVPCGPCSERRKHLFVQDPQTCKCSCKNTDSRCKARQLELNERTCRCDKPRR

SEQ ID NO: 152 - protein, 209 aa, Homo sapiens
MNFLLSWVHWSLALLLYLHHAKWSQAAPMAEGGGQNHHEVVKFMDVYQRSYCHPIETLVDIFQEYPDEIEYIFKPSCVPLMRCGGCCNDEGLECVPTEESNITMQIMRIKPHQGQHIGEMSFLQHNKCECRPKKDRARQEKKSVRGKGKGQKRKRKKSRPCGPCSERRKHLFVQDPQTCKCSCKNTDSRCKARQLELNERTCRCDKPRR

SEQ ID NO: 153 - protein, 389 aa, Homo sapiens
MTDRQTDTAPSPSYHLLPGRRRTVDAAASRGQGPEPAPGGGVEGVGARGVALKLFVQLLGCSRFGGAVVRAGEAEPSGAARSASSGREEPQPEEGEEEEEKEEERGPQWRLGARKPGSWTGEAAVCADSAPAARAPQALARASGRGGRVARRGAEESGPPHSPSRRGSASRAGPGRASETMNFLLSWVHWSLALLLYLHHAKWSQAAPMAEGGGQNHHEVVKFMDVYQRSYCHPIETLVDIFQEYPDEIEYIFKPSCVPLMRCGGCCNDEGLECVPTEESNITMQIMRIKPHQGQHIGEMSFLQHNKCECRPKKDRARQEKKSVRGKGKGQKRKRKKSRPCGPCSERRKHLFVQDPQTCKCSCKNTDSRCKARQLELNERTCRCDKPRR

SEQ ID NO: 154 - protein, 191 aa, Homo sapiens
MNFLLSWVHWSLALLLYLHHAKWSQAAPMAEGGGQNHHEVVKFMDVYQRSYCHPIETLVDIFQEYPDEIEYIFKPSCVPLMRCGGCCNDEGLECVPTEESNITMQIMRIKPHQGQHIGEMSFLQHNKCECRPKKDRARQENPCGPCSERRKHLFVQDPQTCKCSCKNTDSRCKARQLELNERTCRCDKPRR

SEQ ID NO: 155 - protein, 371 aa, Homo sapiens
MTDRQTDTAPSPSYHLLPGRRRTVDAAASRGQGPEPAPGGGVEGVGARGVALKLFVQLLGCSRFGGAVVRAGEAEPSGAARSASSGREEPQPEEGEEEEEKEEERGPQWRLGARKPGSWTGEAAVCADSAPAARAPQALARASGRGGRVARRGAEESGPPHSPSRRGSASRAGPGRASETMNFLLSWVHWSLALLLYLHHAKWSQAAPMAEGGGQNHHEVVKFMDVYQRSYCHPIETLVDIFQEYPDEIEYIFKPSCVPLMRCGGCCNDEGLECVPTEESNITMQIMRIKPHQGQHIGEMSFLQHNKCECRPKKDRARQENPCGPCSERRKHLFVQDPQTCKCSCKNTDSRCKARQLELNERTCRCDKPRR

SEQ ID NO: 156 - protein, 174 aa, Homo sapiens
MNFLLSWVHWSLALLLYLHHAKWSQAAPMAEGGGQNHHEVVKFMDVYQRSYCHPIETLVDIFQEYPDEIEYIFKPSCVPLMRCGGCCNDEGLECVPTEESNITMQIMRIKPHQGQHIGEMSFLQHNKCECRPKKDRARQENPCGPCSERRKHLFVQDPQTCKCSCKNTDSRCKM

SEQ ID NO: 157 - protein, 354 aa, Homo sapiens
MTDRQTDTAPSPSYHLLPGRRRTVDAAASRGQGPEPAPGGGVEGVGARGVALKLFVQLLGCSRFGGAVVRAGEAEPSGAARSASSGREEPQPEEGEEEEEKEEERGPQWRLGARKPGSWTGEAAVCADSAPAARAPQALARASGRGGRVARRGAEESGPPHSPSRRGSASRAGPGRASETMNFLLSWVHWSLALLLYLHHAKWSQAAPMAEGGGQNHHEVVKFMDVYQRSYCHPIETLVDIFQEYPDEIEYIFKPSCVPLMRCGGCCNDEGLECVPTEESNITMQIMRIKPHQGQHIGEMSFLQHNKCECRPKKDRARQENPCGPCSERRKHLFVQDPQTCKCSCKNTDSRCKM

SEQ ID NO: 158 - protein, 147 aa, Homo sapiens
MNFLLSWVHWSLALLLYLHHAKWSQAAPMAEGGGQNHHEVVKFMDVYQRSYCHPIETLVDIFQEYPDEIEYIFKPSCVPLMRCGGCCNDEGLECVPTEESNITMQIMRIKPHQGQHIGEMSFLQHNKCECRPKKDRARQEKCDKPRR

SEQ ID NO: 159 - protein, 327 aa, Homo sapiens
MTDRQTDTAPSPSYHLLPGRRRTVDAAASRGQGPEPAPGGGVEGVGARGVALKLFVQLLGCSRFGGAVVRAGEAEPSGAARSASSGREEPQPEEGEEEEEKEEERGPQWRLGARKPGSWTGEAAVCADSAPAARAPQALARASGRGGRVARRGAEESGPPHSPSRRGSASRAGPGRASETMNFLLSWVHWSLALLLYLHHAKWSQAAPMAEGGGQNHHEVVKFMDVYQRSYCHPIETLVDIFQEYPDEIEYIFKPSCVPLMRCGGCCNDEGLECVPTEESNITMQIMRIKPHQGQHIGEMSFLQHNKCECRPKKDRARQEKCDKPRR

SEQ ID NO: 160 - protein, 191 aa, Homo sapiens
MNFLLSWVHWSLALLLYLHHAKWSQAAPMAEGGGQNHHEVVKFMDVYQRSYCHPIETLVDIFQEYPDEIEYIFKPSCVPLMRCGGCCNDEGLECVPTEESNITMQIMRIKPHQGQHIGEMSFLQHNKCECRPKKDRARQENPCGPCSERRKHLFVQDPQTCKCSCKNTDSRCKARQLELNERTCRSLTRKD

SEQ ID NO: 161 - protein, 371 aa, Homo sapiens
MTDRQTDTAPSPSYHLLPGRRRTVDAAASRGQGPEPAPGGGVEGVGARGVALKLFVQLLGCSRFGGAVVRAGEAEPSGAARSASSGREEPQPEEGEEEEEKEEERGPQWRLGARKPGSWTGEAAVCADSAPAARAPQALARASGRGGRVARRGAEESGPPHSPSRRGSASRAGPGRASETMNFLLSWVHWSLALLLYLHHAKWSQAAPMAEGGGQNHHEVVKFMDVYQRSYCHPIETLVDIFQEYPDEIEYIFKPSCVPLMRCGGCCNDEGLECVPTEESNITMQIMRIKPHQGQHIGEMSFLQHNKCECRPKKDRARQENPCGPCSERRKHLFVQDPQTCKCSCKNTDSRCKARQLELNERTCRSLTRKD

SEQ ID NO: 162 - protein, 137 aa, Homo sapiens
MNFLLSWVHWSLALLLYLHHAKWSQAAPMAEGGGQNHHEVVKFMDVYQRSYCHPIETLVDIFQEYPDEIEYIFKPSCVPLMRCGGCCNDEGLECVPTEESNITMQIMRIKPHQGQHIGEMSFLQHNKCECRCDKPRR

SEQ ID NO: 163 - protein, 317 aa, Homo sapiens
MTDRQTDTAPSPSYHLLPGRRRTVDAAASRGQGPEPAPGGGVEGVGARGVALKLFVQLLGCSRFGGAVVRAGEAEPSGAARSASSGREEPQPEEGEEEEEKEEERGPQWRLGARKPGSWTGEAAVCADSAPAARAPQALARASGRGGRVARRGAEESGPPHSPSRRGSASRAGPGRASETMNFLLSWVHWSLALLLYLHHAKWSQAAPMAEGGGQNHHEVVKFMDVYQRSYCHPIETLVDIFQEYPDEIEYIFKPSCVPLMRCGGCCNDEGLECVPTEESNITMQIMRIKPHQGQHIGEMSFLQHNKCECRCDKPRR

SEQ ID NO: 164 - protein, 351 aa, Homo sapiens
MTDRQTDTAPSPSYHLLPGRRRTVDAAASRGQGPEPAPGGGVEGVGARGVALKLFVQLLGCSRFGGAVVRAGEAEPSGAARSASSGREEPQPEEGEEEEEKEEERGPQWRLGARKPGSWTGEAAVCADSAPAARAPQALARASGRGGRVARRGAEESGPPHSPSRRGSASRAGPGRASETMNFLLSWVHWSLALLLYLHHAKWSQAAPMAEGGGQNHHEVVKFMDVYQRSYCHPIETLVDIFQEYPDEIEYIFKPSCVPLMRCGGCCNDEGLECVPTEESNITMQIMRIKPHQGQHIGEMSFLQHNKCECRPKKDRARQEKKSVRGKGKGQKRKRKKSRYKSWSVCDKPRR

SEQ ID NO: 165 - protein, 351 aa, Homo sapiens; identical to SEQ ID NO: 164

SEQ ID NO: 166 - protein, 171 aa, Homo sapiens
MNFLLSWVHWSLALLLYLHHAKWSQAAPMAEGGGQNHHEVVKFMDVYQRSYCHPIETLVDIFQEYPDEIEYIFKPSCVPLMRCGGCCNDEGLECVPTEESNITMQIMRIKPHQGQHIGEMSFLQHNKCECRPKKDRARQEKKSVRGKGKGQKRKRKKSRYKSWSVCDKPRR

SEQ ID NO: 167 - protein, 188 aa, Homo sapiens
MSPLLRRLLLAALLQLAPAQAPVSQPDAPGHQRKVVSWIDVYTRATCQPREVVVPLTVELMGTVAKQLVPSCVTVQRCGGCCPDDGLECVPTGQHQVRMQILMIRYPSSQLGEMSLEEHSQCECRPKKKDSAVKPDSPRPLCPRCTQHHQRPDPRTCRCRCRRRSFLRCQGRGLELNPDTCRCRKLRR

SEQ ID NO: 168 - protein, 419 aa, Homo sapiens
MHLLGFFSVACSLLAAALLPGPREAPAAAAAFESGLDLSDAEPDAGEATAYASKDLEEQLRSVSSVDELMTVLYPEYWKMYKCQLRKGGWQHNREQANLNSRTEETIKFAAAHYNTEILKSIDNEWRKTQCMPREVCIDVGKEFGVATNTFFKPPCVSVYRCGGCCNSEGLQCMNTSTSYLSKTLFEITVPLSQGPKPVTISFANHTSCRCMSKLDVYRQVHSIIRRSLPATLPQCQAANKTCPTNYMWNNHICRCLAQEDFMFSSDAGDDSTDGFHDICGPNKELDEETCQCVCRAGLRPASCGPHKELDRNSCQCVCKNKLFPSQCGANREFDENTCQCVCKRTCPRNQPLNPGKCACECTESPQKCLLKGKKFHHQTCSCYRRPCTNRQKACEPGFSYSEEVCRCVPSYWKRPQMS

SEQ ID NO: 169 - protein, 207 aa, Homo sapiens
MSPLLRRLLLAALLQLAPAQAPVSQPDAPGHQRKVVSWIDVYTRATCQPREVVVPLTVELMGTVAKQLVPSCVTVQRCGGCCPDDGLECVPTGQHQVRMQILMIRYPSSQLGEMSLEEHSQCECRPKKKDSAVKPDRAATPHHRPQPRSVPGWDSAPGAPSPADITHPTPAPGPSAHAAPSTTSALTPGPAAAAADAAASSVAKGGA

SEQ ID NO: 170 - protein, 739 aa, Homo sapiens
MPGKMVVILGASNILWIMFAASQAFKIETTPESRYLAQIGDSVSLTCSTTGCESPFFSWRTQIDSPLNGKVTNEGTTSTLTMNPVSFGNEHSYLCTATCESRKLEKGIQVEIYSFPKDPEIHLSGPLEAGKPITVKCSVADVYPFDRLEIDLLKGDHLMKSQEFLEDADRKSLETKSLEVTFTPVIEDIGKVLVCRAKLHIDEMDSVPTVRQAVKELQVYISPKNTVISVNPSTKLQEGGSVTMTCSSEGLPAPEIFWSKKLDNGNLQHLSGNATLTLIAMRMEDSGIYVCEGVNLIGKNRKEVELIVQEKPFTVEISPGPRIAAQIGDSVMLTCSVMGCESPSFSWRTQIDSPLSGKVRSEGTNSTLTLSPVSFENEHSYLCTVTCGHKKLEKGIQVELYSFPRDPEIEMSGGLVNGSSVTVSCKVPSVYPLDRLEIELLKGETILENIEFLEDTDMKSLENKSLEMTFIPTIEDTGKALVCQAKLHIDDMEFEPKQRQSTQTLYVNVAPRDTTVLVSPSSILEEGSSVNMTCLSQGFPAPKILWSRQLPNGELQPLSENATLTLISTKMEDSGVYLCEGINQAGRSRKEVELIIQVTPKDIKLTAFPSESVKEGDTVIISCTCGNVPETWIILKKKAETGDTVLKSIDGAYTIRKAQLKDAGVYECESKNKVGSQLRSLTLDVQGRENNKDYFSPELLVLYFASSLIIPAIGMIIYFARKANMKGSYSLVEAQKSKV

SEQ ID NO: 171 - protein, 647 aa, Homo sapiens
MPGKMVVILGASNILWIMFAASQAFKIETTPESRYLAQIGDSVSLTCSTTGCESPFFSWRTQIDSPLNGKVTNEGTTSTLTMNPVSFGNEHSYLCTATCESRKLEKGIQVEIYSFPKDPEIHLSGPLEAGKPITVKCSVADVYPFDRLEIDLLKGDHLMKSQEFLEDADRKSLETKSLEVTFTPVIEDIGKVLVCRAKLHIDEMDSVPTVRQAVKELQVYISPKNTVISVNPSTKLQEGGSVTMTCSSEGLPAPEIFWSKKLDNGNLQHLSGNATLTLIAMRMEDSGIYVCEGVNLIGKNRKEVELIVQAFPRDPEIEMSGGLVNGSSVTVSCKVPSVYPLDRLEIELLKGETILENIEFLEDTDMKSLENKSLEMTFIPTIEDTGKALVCQAKLHIDDMEFEPKQRQSTQTLYVNVAPRDTTVLVSPSSILEEGSSVNMTCLSQGFPAPKILWSRQLPNGELQPLSENATLTLISTKMEDSGVYLCEGINQAGRSRKEVELIIQVTPKDIKLTAFPSESVKEGDTVIISCTCGNVPETWIILKKKAETGDTVLKSIDGAYTIRKAQLKDAGVYECESKNKVGSQLRSLTLDVQGRENNKDYFSPELLVLYFASSLIIPAIGMIIYFARKANMKGSYSLVEAQKSKV

SEQ ID NO: 172 - protein, 677 aa, Homo sapiens
MPGKMVVILGASNILWIMFAASQAFKIETTPESRYLAQIGDSVSLTCSTTGSFPKDPEIHLSGPLEAGKPITVKCSVADVYPFDRLEIDLLKGDHLMKSQEFLEDADRKSLETKSLEVTFTPVIEDIGKVLVCRAKLHIDEMDSVPTVRQAVKELQVYISPKNTVISVNPSTKLQEGGSVTMTCSSEGLPAPEIFWSKKLDNGNLQHLSGNATLTLIAMRMEDSGIYVCEGVNLIGKNRKEVELIVQEKPFTVEISPGPRIAAQIGDSVMLTCSVMGCESPSFSWRTQIDSPLSGKVRSEGTNSTLTLSPVSFENEHSYLCTVTCGHKKLEKGIQVELYSFPRDPEIEMSGGLVNGSSVTVSCKVPSVYPLDRLEIELLKGETILENIEFLEDTDMKSLENKSLEMTFIPTIEDTGKALVCQAKLHIDDMEFEPKQRQSTQTLYVNVAPRDTTVLVSPSSILEEGSSVNMTCLSQGFPAPKILWSRQLPNGELQPLSENATLTLISTKMEDSGVYLCEGINQAGRSRKEVELIIQVTPKDIKLTAFPSESVKEGDTVIISCTCGNVPETWIILKKKAETGDTVLKSIDGAYTIRKAQLKDAGVYECESKNKVGSQLRSLTLDVQGRENNKDYFSPELLVLYFASSLIIPAIGMIIYFARKANMKGSYSLVEAQKSKV

SEQ ID NO: 173 - protein, 266 aa, Homo sapiens
MVCLKLPGGSCMTALTVTLMVLSSPLALSGDTRPRFLWQPKRECHFFNGTERVRFLDRYFYNQEESVRFDSDVGEFRAVTELGRPDAEYWNSQKDILEQARAAVDTYCRHNYGVVESFTVQRRVQPKVTVYPSKTQPLQHHNLLVCSVSGFYPGSIEVRWFLNGQEEKAGMVSTGLIQNGDWTFQTLVMLETVPRSGEVYTCQVEHPSVTSPLTVEWRARSESAQSKMLSGVGGFVLGLLFLGAGLFIYFRNQKGHSGLQPTGFLS

SEQ ID NO: 174 - protein, 366 aa, Homo sapiens
MRVMAPRALLLLLSGGLALTETWACSHSMRYFDTAVSRPGRGEPRFISVGYVDDTQFVRFDSDAASPRGEPRAPWVEQEGPEYWDRETQKYKRQAQADRVSLRNLRGYYNQSEDGSHTLQRMSGCDLGPDGRLLRGYDQSAYDGKDYIALNEDLRSWTAADTAAQITQRKLEAARAAEQLRAYLEGTCVEWLRRYLENGKETLQRAEPPKTHVTHHPLSDHEATLRCWALGFYPAEITLTWQRDGEDQTQDTELVETRPAGDGTFQKWAAVVVPSGQEQRYTCHMQHEGLQEPLTLSWEPSSQPTIPIMGIVAGLAVLVVLAVLGAVVTAMMCRRKSSGGKGGSCSQAACSNSAQGSDESLITCKA

SEQ ID NO: 175 - protein, 365 aa, Homo sapiens
MAVMAPRTLLLLLSGALALTQTWAGSHSMRYFFTSVSRPGRGEPRFIAVGYVDDTQFVRFDSDAASQRMEPRAPWIEQEGPEYWDQETRNVKAQSQTDRVDLGTLRGYYNQSEAGSHTIQIMYGCDVGSDGRFLRGYRQDAYDGKDYIALNEDLRSWTAADMAAQITKRKWEAAHEAEQLRAYLDGTCVEWLRRYLENGKETLQRTDPPKTHMTHHPISDHEATLRCWALGFYPAEITLTWQRDGEDQTQDTELVETRPAGDGTFQKWAAVVVPSGEEQRYTCHVQHEGLPKPLTLRWELSSQPTIPIVGIIAGLVLLGAVITGAVVAAVMWRRKSSDRKGGSYTQAASSDSAQGSDVSLTACKV

SEQ ID NO: 176 - protein, 362 aa, Homo sapiens
MLVMAPRTVLLLLSAALALTETWAGSHSMRYFYTSVSRPGRGEPRFISVGYVDDTQFVRFDSDAASPREEPRAPWIEQEGPEYWDRNTQIYKAQAQTDRESLRNLRGYYNQSEAGSHTLQSMYGCDVGPDGRLLRGHDQYAYDGKDYIALNEDLRSWTAADTAAQITQRKWEAAREAEQRRAYLEGECVEWLRRYLENGKDKLERADPPKTHVTHHPISDHEATLRCWALGFYPAEITLTWQRDGEDQTQDTELVETRPAGDRTFQKWAAVVVPSGEEQRYTCHVQHEGLPKPLTLRWEPSSQSTVPIVGIVAGLAVLAVVVIGAVVAAVMCRRKSSGGKGGSYSQAACSDSAQGSDVSLTA

SEQ ID NO: 177 - protein, 266 aa, Homo sapiens
MVCLRLPGGSCMAVLTVTLMVLSSPLALAGDTRPRFLEYSTSECHFFNGTERVRYLDRYFHNQEENVRFDSDVGEFRAVTELGRPDAEYWNSQKDLLEQKRGRVDNYCRHNYGVVESFTVQRRVHPKVTVYPSKTQPLQHHNLLVCSVSGFYPGSIEVRWFRNGQEEKTGVVSTGLIHNGDWTFQTLVMLETVPRSGEVYTCQVEHPSVTSPLTVEWRARSESAQSKMLSGVGGFVLGLLFLGAGLFIYFRNQKGHSGLQPRGFLS

SEQ ID NO: 178 - protein, 366 aa, Homo sapiens
MRVMAPRALLLLLSGGLALTETWACSHSMRYFDTAVSRPGRGEPRFISVGYVDDTQFVRFDSDAASPRGEPRAPWVEQEGPEYWDRETQNYKRQAQADRVSLRNLRGYYNQSEDGSHTLQRMYGCDLGPDGRLLRGYDQSAYDGKDYIALNEDLRSWTAADTAAQITQRKLEAARAAEQLRAYLEGTCVEWLRRYLENGKETLQRAEPPKTHVTHHPLSDHEATLRCWALGFYPAEITLTWQRDGEDQTQDTELVETRPAGDGTFQKWAAVVVPSGQEQRYTCHMQHEGLQEPLTLSWEPSSQPTIPIMGIVAGLAVLVVLAVLGAVVTAMMCRRKSSGGKGGSCSQAACSNSAQGSDESLITCKA

SEQ ID NO: 179 - protein, 365 aa, Homo sapiens
MAVMAPRTLLLLLSGALALTQTWAGSHSMRYFFTSVSRPGRGEPRFIAVGYVDDTQFVRFDSDAASQKMEPRAPWIEQEGPEYWDQETRNMKAHSQTDRANLGTLRGYYNQSEDGSHTIQIMYGCDVGPDGRFLRGYRQDAYDGKDYIALNEDLRSWTAADMAAQITKRKWEAVHAAEQRRVYLEGRCVDGLRRYLENGKETLQRTDPPKTHMTHHPISDHEATLRCWALGFYPAEITLTWQRDGEDQTQDTELVETRPAGDGTFQKWAAVVVPSGEEQRYTCHVQHEGLPKPLTLRWELSSQPTIPIVGIIAGLVLLGAVITGAVVAAVMWRRKSSDRKGGSYTQAASSDSAQGSDVSLTACKV

SEQ ID NO: 180 - protein, 358 aa, Homo sapiens
MVDGTLLLLLSEALALTQTWAGSHSLKYFHTSVSRPGRGEPRFISVGYVDDTQFVRFDNDAASPRMVPRAPWMEQEGSEYWDRETRSARDTAQIFRVNLRTLRGYYNQSEAGSHTLQWMHGCELGPDGRFLRGYEQFAYDGKDYLTLNEDLRSWTAVDTAAQISEQKSNDASEAEHQRAYLEDTCVEWLHKYLEKGKETLLHLEPPKTHVTHHPISDHEATLRCWALGFYPAEITLTWQQDGEGHTQDTELVETRPAGDGTFQKWAAVVVPSGEEQRYTCHVQHEGLPEPVTLRWKPASQPTIPIVGIIAGLVLLGSVVSGAVVAAVIWRKKSSGGKGGSYSKAEWSDSAQGSESHSL

SEQ ID NO: 181 - protein, 266 aa, Homo sapiens
MVCLKLPGGSYMAKLTVTLMVLSSPLALAGDTRPRFLQQDKYECHFFNGTERVRFLHRDIYNQEEDLRFDSDVGEYRAVTELGRPDAEYWNSQKDFLEDRRAAVDTYCRHNYGVGESFTVQRRVEPKVTVYPARTQTLQHHNLLVCSVNGFYPGSIEVRWFRNSQEEKAGVVSTGLIQNGDWTFQTLVMLETVPRSGEVYTCQVEHPSVTSPLTVEWRAQSESAQSKMLSGVGGFVLGLLFLGAGLFIYFKNQKGHSGLHPTGLVS

SEQ ID NO: 182 - protein, 255 aa, Homo sapiens
MILNKALLLGALALTAVMSPCGGEDIVADHVASYGVNFYQSHGPSGQYTHEFDGDEEFYVDLETKETVWQLPMFSKFISFDPQSALRNMAVGKHTLEFMMRQSNSTAATNEVPEVTVFSKFPVTLGQPNTLICLVDNIFPPVVNITWLSNGHSVTEGVSETSFLSKSDHSFFKISYLTFLPSADEIYDCKVEHWGLDEPLLKHWEPEIPAPMSELTETLVCALGLSVGLMGIVVGTVFIIQGLRSVGASRHQGLL

SEQ ID NO: 183 - protein, 266 aa, Homo sapiens
MVCLKLPGGSSLAALTVTLMVLSSRLAFAGDTRPRFLELRKSECHFFNGTERVRYLDRYFHNQEEFLRFDSDVGEYRAVTELGRPVAESWNSQKDLLEQKRGRVDNYCRHNYGVGESFTVQRRVHPQVTVYPAKTQPLQHHNLLVCSVSGFYPGSIEVRWFRNGQEEKAGVVSTGLIQNGDWTFQTLVMLETVPRSGEVYTCQVEHPSVTSALTVEWRARSESAQSKMLSGVGGFVLGLLFLGAGLFIYFRNQKGHSGLQPTGFLS

SEQ ID NO: 184 - protein, 260 aa, Homo sapiens
MRPEDRMFHIRAVILRALSLAFLLSLRGAGAIKADHVSTYAAFVQTHRPTGEFMFEFDEDEMFYVDLDKKETVWHLEEFGQAFSFEAQGGLANIAILNNNLNTLIQRSNHTQATNDPPEVTVFPKEPVELGQPNTLICHIDKFFPPVLNVTWLCNGELVTEGVAESLFLPRTDYSFHKFHYLTFVPSAEDFYDCRVEHWGLDQPLLKHWEAQEPIQMPETTETVLCALGLVLGLVGIIVGTVLIIKSLRSGHDPRAQGTL

SEQ ID NO: 185 - protein, 260 aa, Homo sapiens; identical to SEQ ID NO: 184

SEQ ID NO: 186 - protein, 296 aa, Homo sapiens
MHRRRSRSCREDQKPVMDDQRDLISNNEQLPMLGRRPGAPESKCSRGALYTGFSILVTLLLAGQATTAYFLYQQQGRLDKLTVTSQNLQLENLRMKLPKPPKPVSKMRMATPLLMQALPMGALPQGPMQNATKYGNMTEDHVMHLLQNADPLKVYPPLKGSFPENLRHLKNTMETIDWKVFESWMHHWLLFEMSRHSLEQKPTDAPPKVLTKCQEEVSHIPAVHPGSFRPKCDENGNYLPLQCYGSIGYCWCVFPNGTEVPNTRSRGHHNCSESLELEDPSSGLGVTKQDLGPVPM

SEQ ID NO: 187 - protein, 258 aa, Homo sapiens
MMVLQVSAAPRTVALTALLMVLLTSVVQGRATPENYLFQGRQECYAFNGTQRFLERYIYNREEFARFDSDVGEFRAVTELGRPAAEYWNSQKDILEEKRAVPDRMCRHNYELGGPMTLQRRVQPRVNVSPSKKGPLQHHNLLVCHVTDFYPGSIQVRWFLNGQEETAGVVSTNLIRNGDWTFQILVMLEMTPQQGDVYTCQVEHTSLDSPVTVEWKAQSDSARSKTLTGAGGFVLGLIICGVGIFMHRRSKKVQRGSA

SEQ ID NO: 188 - protein, 254 aa, Homo sapiens
MAISGVPVLGFFIIAVLMSAQESWAIKEEHVIIQAEFYLNPDQSGEFMFDFDGDEIFHVDMAKKETVWRLEEFGRFASFEAQGALANIAVDKANLEIMTKRSNYTPITNVPPEVTVLTNSPVELREPNVLICFIDKFTPPVVNVTWLRNGKPVTTGVSETVFLPREDHLFRKFHYLPFLPSTEDVYDCRVEHWGLDEPLLKHWEFDAPSPLPETTENVVCALGLTVGLVGIIIGTIFIIKGLRKSNAAERRGPL

SEQ ID NO: 189 - protein, 250 aa, Homo sapiens
MALRAGLVLGFHTLMTLLSPQEAGATKADHMGSYGPAFYQSYGASGQFTHEFDEEQLFSVDLKKSEAVWRLPEFGDFARFDPQGGLAGIAAIKAHLDILVERSNRSRAINVPPRVTVLPKSRVELGQPNILICIVDNIFPPVINITWLRNGQTVTEGVAQTSFYSQPDHLFRKFHYLPFVPSAEDVYDCQVEHWGLDAPLLRHWELQVPIPPPDAMETLVCALGLAIGLVGFLVGTVLIIMGTYVSSVPR

SEQ ID NO: 190 - protein, 227 aa, Homo sapiens
MALQIPGGFWAAAVTVMLVMLSTPVAEARDFPKDFLVQFKGMCYFTNGTERVRGVARYIYNREEYGRFDSDVGEFQAVTELGRSIEDWNNYKDFLEQERAAVDKVCRHNYEAELRTTLQRQVEPTVTISPSRTEALNHHNLLVCSVTDFYPAQIKVRWFRNDQEETAGVVSTSLIRNGDWTFQILVMLEITPQRGDIYTCQVEHPSLQSPITVEWRPRGPPPAGLLH

SEQ ID NO: 191 - protein, 249 aa, Homo sapiens
MGELMAFLLPLIIVLMVKHSDSRTHSLRYFRLGVSDPIHGVPEFISVGYVDSHPITTYDSVTRQKEPRAPWMAENLAPDHWERYTQLLRGWQQMFKVELKRLQRHYNHSGSHTYQRMIGCELLEDGSTTGFLQYAYDGQDFLIFNKDTLSWLAVDNVAHTIKQAWEANQHELLYQKNWLEEECIAWLKRFLEYGKDTLQRTESETIPLVMKAVSGSIVLVIVLAGVGVLVWRRRPREQNGAIYLPTPDR

SEQ ID NO: 192 - protein, 296 aa, Homo sapiens
MGELMAFLLPLIIVLMVKHSDSRTHSLRYFRLGVSDPIHGVPEFISVGYVDSHPITTYDSVTRQKEPRAPWMAENLAPDHWERYTQLLRGWQQMFKVELKRLQRHYNHSDNVAHTIKQAWEANQHELLYQKNWLEEECIAWLKRFLEYGKDTLQRTEPPLVRVNRKETFPGVTALFCKAHGFYPPEIYMTWMKNGEEIVQEIDYGDILPSGDGTYQAWASIELDPQSSNLYSCHVEHCGVHMVLQVPQESETIPLVMKAVSGSIVLVIVLAGVGVLVWRRRPREQNGAIYLPTPDR

SEQ ID NO: 193 - protein, 263 aa, Homo sapiens
MITFLPLLLGLSLGCTGAGGFVAHVESTCLLDDAGTPKDFTYCISFNKDLLTCWDPEENKMAPCEFGVLNSLANVLSQHLNQKDTLMQRLRNGLQNCATHTQPFWGSLTNRTRPPSVQVAKTTPFNTREPVMLACYVWGFYPAEVTITWRKNGKLVMPHSSAHKTAQPNGDWTYQTLSHLALTPSYGDTYTCVVEHTGAPEPILRDWTPGLSPMQTLKVSVSAVTLGLGLIIFSLGVISWRRAGHSSYTPLPGSNYSEGWHIS

SEQ ID NO: 194 - protein, 214 aa, Homo sapiens
MGELMAFLLPLIIVLMVKHSDSRTHSLRYFRLGVSDPIHGVPEFISVGYVDSHPITTYDSVTRQKEPRAPWMAENLAPDHWERYTQLLRGWQQMFKVELKRLQRHYNHSGSHTYQRMIGCELLEDGSTTGFLQYAYDGQDFLIFNKDTLSWLAVDNVAHTIKQAWEANQHELLYQKNWLEEECIAWLKRFLEYGKDTLQRTEQNGAIYLPTPDR

SEQ ID NO: 195 - protein, 341 aa, Homo sapiens
MGELMAFLLPLIIVLMVKHSDSRTHSLRYFRLGVSDPIHGVPEFISVGYVDSHPITTYDSVTRQKEPRAPWMAENLAPDHWERYTQLLRGWQQMFKVELKRLQRHYNHSGSHTYQRMIGCELLEDGSTTGFLQYAYDGQDFLIFNKDTLSWLAVDNVAHTIKQAWEANQHELLYQKNWLEEECIAWLKRFLEYGKDTLQRTEPPLVRVNRKETFPGVTALFCKAHGFYPPEIYMTWMKNGEEIVQEIDYGDILPSGDGTYQAWASIELDPQSSNLYSCHVEHCGVHMVLQVPQESETIPLVMKAVSGSIVLVIVLAGVGVLVWRRRPREQNGAIYLPTPDR

SEQ ID NO: 196 - protein, 266 aa, Homo sapiens
MVCLKLPGGSCMAALTVTLTVLSSPLALAGDTQPRFLEQAKCECHFLNGTERVWNLIRYIYNQEEYARYNSDLGEYQAVTELGRPDAEYWNSQKDLLERRRAEVDTYCRYNYGVVESFTVQRRVQPKVTVYPSKTQPLQHHNLLVCSVNGFYPGSIEVRWFRNGQEEKAGVVSTGLIQNGDWTFQTLVMLETVPRSGEVYTCQVEHPSMMSPLTVQWSARSESAQSKMLSGVGGFVLGLLFLGTGLFIYFRNQKGHSGLQPTGLLS

SEQ ID NO: 197 - protein, 255 aa, Homo sapiens
MILNKALLLGALALTTVMSPCGGEDIVADHVASCGVNLYQFYGPSGQYTHEFDGDEQFYVDLERKETAWRWPEFSKFGGFDPQGALRNMAVAKHNLNIMIKRYNSTAATNEVPEVTVFSKSPVTLGQPNTLICLVDNIFPPVVNITWLSNGQSVTEGVSETSFLSKSDHSFFKISYLTFLPSADEIYDCKVEHWGLDQPLLKHWEPEIPAPMSELTETVVCALGLSVGLMGIVVGTVFIIQGLRSVGASRHQGPL

SEQ ID NO: 198 - protein, 261 aa, Homo sapiens
MSWKKALRIPGDLRVATVTLMLAMLSSLLAEGRDSPEDFVFQFKGMCYFTNGTERVRLVTRYIYNREEYARFDSDVGVYRAVTPQGRPDAEYWNSQKEVLEGTRAELDTVCRHNYEVAFRGILQRRVEPTVTISPSRTEALNHHNLLVCSVTDFYPGQIKVRWFRNDQEETAGVVSTPLIRNGDWTFQILVMLEMTPQRGDVYTCHVEHPSLQSPITVEWRAQSESAQSKMLSGVGGFVLGLIFLGLGLIIRQRSQKGLLH

SEQ ID NO: 199 - protein, 269 aa, Homo sapiens
MSWKKALRIPGDLRVATVTLMLAMLSSLLAEGRDSPEDFVFQFKGMCYFTNGTERVRLVTRYIYNREEYARFDSDVGVYRAVTPQGRPDAEYWNSQKEVLEGTRAELDTVCRHNYEVAFRGILQRRVEPTVTISPSRTEALNHHNLLVCSVTDFYPGQIKVRWFRNDQEETAGVVSTPLIRNGDWTFQILVMLEMTPQRGDVYTCHVEHPSLQSPITVEWRAQSESAQSKMLSGVGGFVLGLIFLGLGLIIRQRSQKGPQGPPPAGLLH

SEQ ID NO: 200 - protein, 261 aa, Homo sapiens
MSWKKALRIPGGLRAATVTLMLSMLSTPVAEGRDSPEDFVYQFKGMCYFTNGTERVRLVSRSIYNREEIVRFDSDVGEFRAVTLLGLPAAEYWNSQKDILERKRAAVDRVCRHNYQLELRTTLQRRVEPTVTISPSRTEALNHHNLLVCSVTDFYPAQIKVRWFRNDQEETAGVVSTPLIRNGDWTFQILVMLEMTPQRGDVYTCHVEHPSLQSPITVEWRAQSESAQSKMLSGIGGFVLGLIFLGLGLIIHHRSQKGLLH

SEQ ID NO: 201 - protein, 273 aa, Homo sapiens
MGSGWVPWVVALLVNLTRLDSSMTQGTDSPEDFVIQAKADCYFTNGTEKVQFVVRFIFNLEEYVRFDSDVGMFVALTKLGQPDAEQWNSRLDLLERSRQAVDGVCRHNYRLGAPFTVGRKVQPEVTVYPERTPLLHQHNLLHCSVTGFYPGDIKIKWFLNGQEERAGVMSTGPIRNGDWTFQTVVMLEMTPELGHVYTCLVDHSSLLSPVSVEWRAQSEYSWRKMLSGIAAFLLGLIFLLVGIVIQLRAQKGYVRTQMSGNEVSRAVLLPQSC

SEQ ID NO: 202 - protein, 260 aa, Homo sapiens; identical to SEQ ID NO: 184

SEQ ID NO: 203 - protein, 261 aa, Homo sapiens
MGHEQNQGAALLQMLPLLWLLPHSWAVPEAPTPMWPDDLQNHTFLHTVYCQDGSPSVGLSEAYDEDQLFFFDFSQNTRVPRLPEFADWAQEQGDAPAILFDKEFCEWMIQQIGPKLDGKIPVSRGFPIAEVFTLKPLEFGKPNTLVCFVSNLFPPMLTVNWQHHSVPVEGFGPTFVSAVDGLSFQAFSYLNFTPEPSDIFSCIVTHEIDRYTAIAYWVPRNALPSDLLENVLCGVAFGLGVLGIIVGIVLIIYFRKPCSGD

SEQ ID NO: 204 - protein, 346 aa, Homo sapiens
MAPRSLLLLLSGALALTDTWAGSHSLRYFSTAVSRPGRGEPRYIAVEYVDDTQFLRFDSDAAIPRMEPREPWVEQEGPQYWEWTTGYAKANAQTDRVALRNLLRRYNQSEAGSHTLQGMNGCDMGPDGRLLRGYHQHAYDGKDYISLNEDLRSWTAADTVAQITQRFYEAEEYAEEFRTYLEGECLELLRRYLENGKETLQRADPPKAHVAHHPISDHEATLRCWALGFYPAEITLTWQRDGEEQTQDTELVETRPAGDGTFQKWAAVVVPPGEEQRYTCHVQHEGLPQPLILRWEQSPQPTIPIVGIVAGLVVLGAVVTGAVVAAVMWRKKSSDRNRGSYSQAAV

SEQ ID NO: 205 - protein, 442 aa, Homo sapiens
MAPRSLLLLLSGALALTDTWAGSHSLRYFSTAVSRPGRGEPRYIAVEYVDDTQFLRFDSDAAIPRMEPREPWVEQEGPQYWEWTTGYAKANAQTDRVALRNLLRRYNQSEAGSHTLQGMNGCDMGPDGRLLRGYHQHAYDGKDYISLNEDLRSWTAADTVAQITQRFYEAEEYAEEFRTYLEGECLELLRRYLENGKETLQRADPPKAHVAHHPISDHEATLRCWALGFYPAEITLTWQRDGEEQTQDTELVETRPAGDGTFQKWAAVVVPPGEEQRYTCHVQHEGLPQPLILRWEQSPQPTIPIVGIVAGLVVLGAVVTGAVVAAVMWRKKSSDRNRGSYSQAAAYSVVSGNLMITWWSSLFLLGVLFQGYLGCLRSHSVLGRRKVGDMWILFFLWLWTSFNTAFLALQSLRFGFGFRRGRSFLLRSWHHLMKRVQIKIFD

SEQ ID NO: 206 - protein, 254 aa, Homo sapiens
MAPRSLLLLLSGALALTDTWAGSHSLRYFSTAVSRPGRGEPRYIAVEYVDDTQFLRFDSDAAIPRMEPREPWVEQEGPQYWEWTTGYAKANAQTDRVALRNLLRRYNQSEAGSHTLQGMNGCDMGPDGRLLRGYHQHAYDGKDYISLNEDLRSWTAADTVAQITQRFYEAEEYAEEFRTYLEGECLELLRRYLENGKETLQRAEQSPQPTIPIVGIVAGLVVLGAVVTGAVVAAVMWRKKSSDRNRGSYSQAAV

SEQ ID NO: 207 - protein, 338 aa, Homo sapiens
MVVMAPRTLFLLLSGALTLTETWAGSHSMRYFSAAVSRPGRGEPRFIAMGYVDDTQFVRFDSDSACPRMEPRAPWVEQEGPEYWEEETRNTKAHAQTDRMNLQTLRGYYNQSEASSHTLQWMIGCDLGSDGRLLRGYEQYAYDGKDYLALNEDLRSWTAADTAAQISKRKCEAANVAEQRRAYLEGTCVEWLHRYLENGKEMLQRADPPKTHVTHHPVFDYEATLRCWALGFYPAEIILTWQRDGEDQTQDVELVETRPAGDGTFQKWAAVVVPSGEEQRYTCHVQHEGLPEPLMLRWKQSSLPTIPIMGIVAGLVVLAAVVTGAAVAAVLWRKKSSD

SEQ ID NO: 208 - protein, 205 aa, Homo sapiens
MTERRVPFSLLRGPSWDPFRDWYPHSRLFDQAFGLPRLPEEWSQWLGGSSWPGYVRPLPPAAIESPAVAAPAYSRALSRQLSSGVSEIRHTADRWRVSLDVNHFAPDELTVKTKDGVVEITGKHEERQDEHGYISRCFTRKYTLPPGVDPTQVSSSLSPEGTLTVEAPMPKLATQSNEITIPVTFESRAQLGGPEAAKSDETAAK

SEQ ID NO: 209 - protein, 732 aa, Homo sapiens
MPEETQTQDQPMEEEEVETFAFQAEIAQLMSLIINTFYSNKEIFLRELISNSSDALDKIRYESLTDPSKLDSGKELHINLIPNKQDRTLTIVDTGIGMTKADLINNLGTIAKSGTKAFMEALQAGADISMIGQFGVGFYSAYLVAEKVTVITKHNDDEQYAWESSAGGSFTVRTDTGEPMGRGTKVILHLKEDQTEYLEERRIKEIVKKHSQFIGYPITLFVEKERDKEVSDDEAEEKEDKEEEKEKEEKESEDKPEIEDVGSDEEEEKKDGDKKKKKKIKEKYIDQEELNKTKPIWTRNPDDITNEEYGEFYKSLTNDWEDHLAVKHFSVEGQLEFRALLFVPRRAPFDLFENRKKKNNIKLYVRRVFIMDNCEELIPEYLNFIRGVVDSEDLPLNISREMLQQSKILKVIRKNLVKKCLELFTELAEDKENYKKFYEQFSKNIKLGIHEDSQNRKKLSELLRYYTSASGDEMVSLKDYCTRMKENQKHIYYITGETKDQVANSAFVERLRKHGLEVIYMIEPIDEYCVQQLKEFEGKTLVSVTKEGLELPEDEEEKKKQEEKKTKFENLCKIMKDILEKKVEKVVVSNRLVTSPCCIVTSTYGWTANMERIMKAQALRDNSTMGYMAAKKHLEINPDHSIIETLRQKAEADKNDKSVKDLVILLYETALLSSGFSLEDPQTHANRIYRMIKLGLGIDEDDPTADDTSAAVTEEMPPLEGDDDTSRMEEVD

SEQ ID NO: 210 - protein, 160 aa, Homo sapiens
MEIPVPVQPSWLRRASAPLPGLSAPGRLFDQRFGEGLLEAELAALCPTTLAPYYLRAPSVALPVAQVPTDPGHFSVLLDVKHFSPEEIAVKVVGEHVEVHARHEERPDEHGFVAREFHRRYRLPPGVDPAAVTSALSPEGVLSIQAAPASAQAPPPAAAK

SEQ ID NO: 211 - protein, 854 aa, Homo sapiens
MPPCSGGDGSTPPGPSLRDRDCPAQSAEYPRDRLDPRPGSPSEASSPPFLRSRAPVNWYQEKAQVFLWHLMVSGSTTLLCLWKQPFHVSAFPVTASLAFRQSQGAGQHLYKDLQPFILLRLLMPEETQTQDQPMEEEEVETFAFQAEIAQLMSLIINTFYSNKEIFLRELISNSSDALDKIRYESLTDPSKLDSGKELHINLIPNKQDRTLTIVDTGIGMTKADLINNLGTIAKSGTKAFMEALQAGADISMIGQFGVGFYSAYLVAEKVTVITKHNDDEQYAWESSAGGSFTVRTDTGEPMGRGTKVILHLKEDQTEYLEERRIKEIVKKHSQFIGYPITLFVEKERDKEVSDDEAEEKEDKEEEKEKEEKESEDKPEIEDVGSDEEEEKKDGDKKKKKKIKEKYIDQEELNKTKPIWTRNPDDITNEEYGEFYKSLTNDWEDHLAVKHFSVEGQLEFRALLFVPRRAPFDLFENRKKKNNIKLYVRRVFIMDNCEELIPEYLNFIRGVVDSEDLPLNISREMLQQSKILKVIRKNLVKKCLELFTELAEDKENYKKFYEQFSKNIKLGIHEDSQNRKKLSELLRYYTSASGDEMVSLKDYCTRMKENQKHIYYITGETKDQVANSAFVERLRKHGLEVIYMIEPIDEYCVQQLKEFEGKTLVSVTKEGLELPEDEEEKKKQEEKKTKFENLCKIMKDILEKKVEKVVVSNRLVTSPCCIVTSTYGWTANMERIMKAQALRDNSTMGYMAAKKHLEINPDHSIIETLRQKAEADKNDKSVKDLVILLYETALLSSGFSLEDPQTHANRIYRMIKLGLGIDEDDPTADDTSAAVTEEMPPLEGDDDTSRMEEVD

SEQ ID NO: 212 - protein, 724 aa, Homo sapiens
MPEEVHHGEEEVETFAFQAEIAQLMSLIINTFYSNKEIFLRELISNASDALDKIRYESLTDPSKLDSGKELKIDIIPNPQERTLTLVDTGIGMTKADLINNLGTIAKSGTKAFMEALQAGADISMIGQFGVGFYSAYLVAEKVVVITKHNDDEQYAWESSAGGSFTVRADHGEPIGRGTKVILHLKEDQTEYLEERRVKEVVKKHSQFIGYPITLYLEKEREKEISDDEAEEEKGEKEEEDKDDEEKPKIEDVGSDEEDDSGKDKKKKTKKIKEKYIDQEELNKTKPIWTRNPDDITQEEYGEFYKSLTNDWEDHLAVKHFSVEGQLEFRALLFIPRRAPFDLFENKKKKNNIKLYVRRVFIMDSCDELIPEYLNFIRGVVDSEDLPLNISREMLQQSKILKVIRKNIVKKCLELFSELAEDKENYKKFYEAFSKNLKLGIHEDSTNRRRLSELLRYHTSQSGDEMTSLSEYVSRMKETQKSIYYITGESKEQVANSAFVERVRKRGFEVVYMTEPIDEYCVQQLKEFDGKSLVSVTKEGLELPEDEEEKKKMEESKAKFENLCKLMKEILDKKVEKVTISNRLVSSPCCIVTSTYGWTANMERIMKAQALRDNSTMGYMMAKKHLEINPDHPIVETLRQKAEADKNDKAVKDLVVLLFETALLSSGFSLEDPQTHSNRIYRMIKLGLGIDEDEVAAEEPNAAVPDEIPPLEGDEDASRMEEVD

SEQ ID NO: 213 - protein, 102 aa, Homo sapiens
MAGQAFRKFLPLFDRVLVERSAAETVTKGGIMLPEKSQGKVLQATVVAVGSGSKGKGGEIQPVSVKVGDKVLLPEYGGTKVVLDDKDYFLFRDGDILGKYVD

SEQ ID NO: 214 - protein, 641 aa, Homo sapiens
MAKAAAIGIDLGTTYSCVGVFQHGKVEIIANDQGNRTTPSYVAFTDTERLIGDAAKNQVALNPQNTVFDAKRLIGRKFGDPVVQSDMKHWPFQVINDGDKPKVQVSYKGETKAFYPEEISSMVLTKMKEIAEAYLGYPVTNAVITVPAYFNDSQRQATKDAGVIAGLNVLRIINEPTAAAIAYGLDRTGKGERNVLIFDLGGGTFDVSILTIDDGIFEVKATAGDTHLGGEDFDNRLVNHFVEEFKRKHKKDISQNKRAVRRLRTACERAKRTLSSSTQASLEIDSLFEGIDFYTSITRARFEELCSDLFRSTLEPVEKALRDAKLDKAQIHDLVLVGGSTRIPKVQKLLQDFFNGRDLNKSINPDEAVAYGAAVQAAILMGDKSENVQDLLLLDVAPLSLGLETAGGVMTALIKRNSTIPTKQTQIFTTYSDNQPGVLIQVYEGERAMTKDNNLLGRFELSGIPPAPRGVPQIEVTFDIDANGILNVTATDKSTGKANKITITNDKGRLSKEEIERMVQEAEKYKAEDEVQRERVSAKNALESYAFNMKSAVEDEGLKGKISEADKKKVLDKCQEVISWLDANTLAEKDEFEHKRKELEQVCNPIISGLYQGAGGPGPGGFGAQGPKGGSGSGPTIEEVD

SEQ ID NO: 215 - protein, 641 aa, Homo sapiens; identical to SEQ ID NO: 214

SEQ ID NO: 216 - protein, 858 aa, Homo sapiens
MSVVGLDVGSQSCYIAVARAGGIETIANEFSDRCTPSVISFGSKNRTIGVAAKNQQITHANNTVSNFKRFHGRAFNDPFIQKEKENLSYDLVPLKNGGVGIKVMYMGEEHLFSVEQITAMLLTKLKETAENSLKKPVTDCVISVPSFFTDAERRSVLDAAQIVGLNCLRLMNDMTAVALNYGIYKQDLPSLDEKPRIVVFVDMGHSAFQVSACAFNKGKLKVLGTAFDPFLGGKNFDEKLVEHFCAEFKTKYKLDAKSKIRALLRLYQECEKLKKLMSSNSTDLPLNIECFMNDKDVSGKMNRSQFEELCAELLQKIEVPLYSLLEQTHLKVEDVSAVEIVGGATRIPAVKERIAKFFGKDISTTLNADEAVARGCALQCAILSPAFKVREFSVTDAVPFPISLIWNHDSEDTEGVHEVFSRNHAAPFSKVLTFLRRGPFELEAFYSDPQGVPYPEAKIGRFVVQNVSAQKDGEKSRVKVKVRVNTHGIFTISTASMVEKVPTEENEMSSEADMECLNQRPPENPDTDKNVQQDNSEAGTQPQVQTDAQQTSQSPPSPELTSEENKIPDADKANEKKVDQPPEAKKPKIKVVNVELPIEANLVWQLGKDLLNMYIETEGKMIMQDKLEKERNDAKNAVEEYVYEFRDKLCGPYEKFICEQDHQNFLRLLTETEDWLYEEGEDQAKQAYVDKLEELMKIGTPVKVRFQEAEERPKMFEELGQRLQHYAKIAADFRNKDEKYNHIDESEMKKVEKSVNEVMEWMNNVMNAQAKKSLDQDPVVRAQEIKTKIKELNNTCEPVVTQPKPKIESPKLERTPNGPNIDKKEEDLEDKNNFGAEPPHQNGECYPNEKNSVNMDLD

SEQ ID NO: 217 - protein, 639 aa, Homo sapiens
MSARGPAIGIDLGTTYSCVGVFQHGKVEIIANDQGNRTTPSYVAFTDTERLIGDAAKNQVAMNPTNTIFDAKRLIGRKFEDATVQSDMKHWPFRVVSEGGKPKVQVEYKGETKTFFPEEISSMVLTKMKEIAEAYLGGKVHSAVITVPAYFNDSQRQATKDAGTITGLNVLRIINEPTAAAIAYGLDKKGCAGGEKNVLIFDLGGGTFDVSILTIEDGIFEVKSTAGDTHLGGEDFDNRMVSHLAEEFKRKHKKDIGPNKRAVRRLRTACERAKRTLSSSTQASIEIDSLYEGVDFYTSITRARFEELNADLFRGTLEPVEKALRDAKLDKGQIQEIVLVGGSTRIPKIQKLLQDFFNGKELNKSINPDEAVAYGAAVQAAILIGDKSENVQDLLLLDVTPLSLGIETAGGVMTPLIKRNTTIPTKQTQTFTTYSDNQSSVLVQVYEGERAMTKDNNLLGKFDLTGIPPAPRGVPQIEVTFDIDANGILNVTAADKSTGKENKITITNDKGRLSKDDIDRMVQEAERYKSEDEANRDRVAAKNALESYTYNIKQTVEDEKLRGKISEQDKNKILDKCQEVINWLDRNQMAEKDEYEHKQKELERVCNPIISKLYQGGPGGGSGGGGSGASGGPTIEEVD

SEQ ID NO: 218 - protein, 150 aa, Homo sapiens
MAKIILRHLIEIPVRYQEEFEARGLEDCRLDHALYALPGPTIVDLRKTRAAQSPPVDSAAETPPREGKSHFQILLDVVQFLPEDIIIQTFEGWLLIKAQHGTRMDEHGFISRSFTRQYKLPDGVEIKDLSAVLCHDGILVVEVKDPVGTK

SEQ ID NO: 219 - protein, 239 aa, Homo sapiens
MAHAGRTGYDNREIVMKYIHYKLSQRGYEWDAGDVGAAPPGAAPAPGIFSSQPGHTPHPAASRDPVARTSPLQTPAAPGAAAGPALSPVPPVVHLTLRQAGDDFSRRYRRDFAEMSSQLHLTPFTARGRFATVVEELFRDGVNWGRIVAFFEFGGVMCVESVNREMSPLVDNIALWMTEYLNRHLHTWIQDNGGWDAFVELYGPSMRPLFDFSWLSLKTLLSLALVGACITLGAYLGHK

SEQ ID NO: 220 - protein, 205 aa, Homo sapiens
MAHAGRTGYDNREIVMKYIHYKLSQRGYEWDAGDVGAAPPGAAPAPGIFSSQPGHTPHPAASRDPVARTSPLQTPAAPGAAAGPALSPVPPVVHLTLRQAGDDFSRRYRRDFAEMSSQLHLTPFTARGRFATVVEELFRDGVNWGRIVAFFEFGGVMCVESVNREMSPLVDNIALWMTEYLNRHLHTWIQDNGGWVGALGDVSLG

SEQ ID NO: 221 - protein, 614 aa, Homo sapiens
MGNLKSVAQEPGPPCGLGLGLGLGLCGKQGPATPAPEPSRAPASLLPPAPEHSPPSSPLTQPPEGPKFPRVKNWEVGSITYDTLSAQAQQDGPCTPRRCLGSLVFPRKLQGRPSPGPPAPEQLLSQARDFINQYYSSIKRSGSQAHEQRLQEVEAEVAATGTYQLRESELVFGAKQAWRNAPRCVGRIQWGKLQVFDARDCRSAQEMFTYICNHIKYATNRGNLRSAITVFPQRCPGRGDFRIWNSQLVRYAGYRQQDGSVRGDPANVEITELCIQHGWTPGNGRFDVLPLLLQAPDDPPELFLLPPELVLEVPLEHPTLEWFAALGLRWYALPAVSNMLLEIGGLEFPAAPFSGWYMSTEIGTRNLCDPHRYNILEDVAVCMDLDTRTTSSLWKDKAAVEINVAVLHSYQLAKVTIVDHHAATASFMKHLENEQKARGGCPADWAWIVPPISGSLTPVFHQEMVNYFLSPAFRYQPDPWKGSAAKGTGITRKKTFKEVANAVKISASLMGTVMAKRVKATILYGSETGRAQSYAQQLGRLFRKAFDPRVLCMDEYDVVSLEHETLVLVVTSTFGNGDPPENGERWGFAMLPRLVSNSWVQAIHLPRPPKVLRL

SEQ ID NO: 222 - protein, 1203 aa, Homo sapiens
MGNLKSVAQEPGPPCGLGLGLGLGLCGKQGPATPAPEPSRAPASLLPPAPEHSPPSSPLTQPPEGPKFPRVKNWEVGSITYDTLSAQAQQDGPCTPRRCLGSLVFPRKLQGRPSPGPPAPEQLLSQARDFINQYYSSIKRSGSQAHEQRLQEVEAEVAATGTYQLRESELVFGAKQAWRNAPRCVGRIQWGKLQVFDARDCRSAQEMFTYICNHIKYATNRGNLRSAITVFPQRCPGRGDFRIWNSQLVRYAGYRQQDGSVRGDPANVEITELCIQHGWTPGNGRFDVLPLLLQAPDDPPELFLLPPELVLEVPLEHPTLEWFAALGLRWYALPAVSNMLLEIGGLEFPAAPFSGWYMSTEIGTRNLCDPHRYNILEDVAVCMDLDTRTTSSLWKDKAAVEINVAVLHSYQLAKVTIVDHHAATASFMKHLENEQKARGGCPADWAWIVPPISGSLTPVFHQEMVNYFLSPAFRYQPDPWKGSAAKGTGITRKKTFKEVANAVKISASLMGTVMAKRVKATILYGSETGRAQSYAQQLGRLFRKAFDPRVLCMDEYDVVSLEHETLVLVVTSTFGNGDPPENGESFAAALMEMSGPYNSSPRPEQHKSYKIRFNSISCSDPLVSSWRRKRKESSNTDSAGALGTLRFCVFGLGSRAYPHFCAFARAVDTRLEELGGERLLQLGQGDELCGQEEAFRGWAQAAFQAACETFCVGEDAKAAARDIFSPKRSWKRQRYRLSAQAEGLQLLPGLIHVHRRKMFQATIRSVENLQSSKSTRATILVRLDTGGQEGLQYQPGDHIGVCPPNRPGLVEALLSRVEDPPAPTEPVAVEQLEKGSPGGPPPGWVRDPRLPPCTLRQALTFFLDITSPPSPQLLRLLSTLAEEPREQQELEALSQDPRRYEEWKWFRCPTLLEVLEQFPSVALPAPLLLTQLPLLQPRYYSVSSAPSTHPGEIHLTVAVLAYRTQDGLGPLHYGVCSTWLSQLKPGDPVPCFIRGAPSFRLPPDPSLPCILVGPGTGIAPFRGFWQERLHDIESKGLQPTPMTLVFGCRCSQLDHLYRDEVQNAQQRGVFGRVLTAFSREPDNPKTYVQDILRTELAAEVHRVLCLERGHMFVCGDVTMATNVLQTVQRILATEGDMELDEAGDVIGVLRDQQRYHEDIFGLTLRTQEVTSRIRTQSFSLQERQLRGAVPWAFDPPGSDTNSP

SEQ ID NO: 223 - protein, 629 aa, Homo sapiens
MGNLKSVAQEPGPPCGLGLGLGLGLCGKQGPATPAPEPSRAPASLLPPAPEHSPPSSPLTQPPEGPKFPRVKNWEVGSITYDTLSAQAQQDGPCTPRRCLGSLVFPRKLQGRPSPGPPAPEQLLSQARDFINQYYSSIKRSGSQAHEQRLQEVEAEVAATGTYQLRESELVFGAKQAWRNAPRCVGRIQWGKLQVFDARDCRSAQEMFTYICNHIKYATNRGNLRSAITVFPQRCPGRGDFRIWNSQLVRYAGYRQQDGSVRGDPANVEITELCIQHGWTPGNGRFDVLPLLLQAPDDPPELFLLPPELVLEVPLEHPTLEWFAALGLRWYALPAVSNMLLEIGGLEFPAAPFSGWYMSTEIGTRNLCDPHRYNILEDVAVCMDLDTRTTSSLWKDKAAVEINVAVLHSYQLAKVTIVDHHAATASFMKHLENEQKARGGCPADWAWIVPPISGSLTPVFHQEMVNYFLSPAFRYQPDPWKGSAAKGTGITRKKTFKEVANAVKISASLMGTVMAKRVKATILYGSETGRAQSYAQQLGRLFRKAFDPRVLCMDEYDVVSLEHETLVLVVTSTFGNGDPPENGEGLTLWPRLECSSTITAHCSLNLLDSSNPPTSTSQVVGTTGACHDA

SEQ ID NO: 224 - protein, 596 aa, Homo sapiens
MGNLKSVAQEPGPPCGLGLGLGLGLCGKQGPATPAPEPSRAPASLLPPAPEHSPPSSPLTQPPEGPKFPRVKNWEVGSITYDTLSAQAQQDGPCTPRRCLGSLVFPRKLQGRPSPGPPAPEQLLSQARDFINQYYSSIKRSGSQAHEQRLQEVEAEVAATGTYQLRESELVFGAKQAWRNAPRCVGRIQWGKLQVFDARDCRSAQEMFTYICNHIKYATNRGNLRSAITVFPQRCPGRGDFRIWNSQLVRYAGYRQQDGSVRGDPANVEITELCIQHGWTPGNGRFDVLPLLLQAPDDPPELFLLPPELVLEVPLEHPTLEWFAALGLRWYALPAVSNMLLEIGGLEFPAAPFSGWYMSTEIGTRNLCDPHRYNILEDVAVCMDLDTRTTSSLWKDKAAVEINVAVLHSYQLAKVTIVDHHAATASFMKHLENEQKARGGCPADWAWIVPPISGSLTPVFHQEMVNYFLSPAFRYQPDPWKGSAAKGTGITRKKTFKEVANAVKISASLMGTVMAKRVKATILYGSETGRAQSYAQQLGRLFRKAFDPRVLCMDEYDVVSLEHETLVLVVTSTFGNGDPPENGESVSLPEVSVTTE

SEQ ID NO: 225 - protein, 1468 aa, Homo sapiens
MEDHMFGVQQIQPNVISVRLFKRKVGGLGFLVKERVSKPPVIISDLIRGGAAEQSGLIQAGDIILAVNGRPLVDLSYDSALEVLRGIASETHVVLILRGPEGFTTHLETTFTGDGTPKTIRVTQPLGPPTKAVDLSHQPPAGKEQPLAVDGASGPGNGPQHAYDDGQEAGSLPHANGLAPRPPGQDPAKKATRVSLQGRGENNELLKEIEPVLSLLTSGSRGVKGGAPAKAEMKDMGIQVDRDLDGKSHKPLPLGVENDRVFNDLWGKGNVPVVLNNPYSEKEQPPTSGKQSPTKNGSPSKCPRFLKVKNWETEVVLTDTLHLKSTLETGCTEYICMGSIMHPSQHARRPEDVRTKGQLFPLAKEFIDQYYSSIKRFGSKAHMERLEEVNKEIDTTSTYQLKDTELIYGAKHAWRNASRCVGRIQWSKLQVFDARDCTTAHGMFNYICNHVKYATNKGNLRSAITIFPQRTDGKHDFRVWNSQLIRYAGYKQPDGSTLGDPANVQFTEICIQQGWKPPRGRFDVLPLLLQANGNDPELFQIPPELVLEVPIRHPKFEWFKDLGLKWYGLPAVSNMLLEIGGLEFSACPFSGWYMGTEIGVRDYCDNSRYNILEEVAKKMNLDMRKTSSLWKDQALVEINIAVLYSFQSDKVTIVDHHSATESFIKHMENEYRCRGGCPADWVWIVPPMSGSITPVFHQEMLNYRLTPSFEYQPDPWNTHVWKGTNGTPTKRRAIGFKKLAEAVKFSAKLMGQAMAKRVKATILYATETGKSQAYAKTLCEIFKHAFDAKVMSMEEYDIVHLEHETLVLVVTSTFGNGDPPENGEKFGCALMEMRHPNSVQEERKYPEPLRFFPRKGPPLPNGDTEVHGLAAARDSQHRSYKVRFNSVSSYSDSQKSSGDGPDLRDNFESAGPLANVRFSVFGLGSRAYPHFCAFGHAVDTLLEELGGERILKMREGDELCGQEEAFRTWAKKVFKAACDVFCVGDDVNIEKANNSLISNDRSWKRNKFRLTFVAEAPELTQGLSNVHKKRVSAARLLSRQNLQSPKSSRSTIFVRLHTNGSQELQYQPGDHLGVFPGNHEDLVNALIERLEDAPPVNQMVKVELLEERNTALGVISNWTDELRLPPCTIFQAFKYYLDITTPPTPLQLQQFASLATSEKEKQRLLVLSKGLQEYEEWKWGKNPTIVEVLEEFPSIQMPATLLLTQLSLLQPRYYSISSSPDMYPDEVHLTVAIVSYRTRDGEGPIHHGVCSSWLNRIQADELVPCFVRGAPSFHLPRNPQVPCILVGPGTGIAPFRSFWQQRQFDIQHKGMNPCPMVLVFGCRQSKIDHIYREETLQAKNKGVFRELYTAYSREPDKPKKYVQDILQEQLAESVYRALKEQGGHIYVCGDVTMAADVLKAIQRIMTQQGKLSAEDAGVFISRMRDDNRYHEDIFGVTLRTYEVTNRLRSESIAFIEESKKDTDEVFSS

SEQ ID NO: 226 - protein, 1434 aa, Homo sapiens
MEDHMFGVQQIQPNVISVRLFKRKVGGLGFLVKERVSKPPVIISDLIRGGAAEQSGLIQAGDIILAVNGRPLVDLSYDSALEVLRGIASETHVVLILRGPEGFTTHLETTFTGDGTPKTIRVTQPLGPPTKAVDLSHQPPAGKEQPLAVDGASGPGNGPQHAYDDGQEAGSLPHANGLAPRPPGQDPAKKATRVSLQGRGENNELLKEIEPVLSLLTSGSRGVKGGAPAKAEMKDMGIQVDRDLDGKSHKPLPLGVENDRVFNDLWGKGNVPVVLNNPYSEKEQPPTSGKQSPTKNGSPSKCPRFLKVKNWETEVVLTDTLHLKSTLETGCTEYICMGSIMHPSQHARRPEDVRTKGQLFPLAKEFIDQYYSSIKRFGSKAHMERLEEVNKEIDTTSTYQLKDTELIYGAKHAWRNASRCVGRIQWSKLQVFDARDCTTAHGMFNYICNHVKYATNKGNLRSAITIFPQRTDGKHDFRVWNSQLIRYAGYKQPDGSTLGDPANVQFTEICIQQGWKPPRGRFDVLPLLLQANGNDPELFQIPPELVLEVPIRHPKFEWFKDLGLKWYGLPAVSNMLLEIGGLEFSACPFSGWYMGTEIGVRDYCDNSRYNILEEVAKKMNLDMRKTSSLWKDQALVEINIAVLYSFQSDKVTIVDHHSATESFIKHMENEYRCRGGCPADWVWIVPPMSGSITPVFHQEMLNYRLTPSFEYQPDPWNTHVWKGTNGTPTKRRAIGFKKLAEAVKFSAKLMGQAMAKRVKATILYATETGKSQAYAKTLCEIFKHAFDAKVMSMEEYDIVHLEHETLVLVVTSTFGNGDPPENGEKFGCALMEMRHPNSVQEERKSYKVRFNSVSSYSDSQKSSGDGPDLRDNFESAGPLANVRFSVFGLGSRAYPHFCAFGHAVDTLLEELGGERILKMREGDELCGQEEAFRTWAKKVFKAACDVFCVGDDVNIEKANNSLISNDRSWKRNKFRLTFVAEAPELTQGLSNVHKKRVSAARLLSRQNLQSPKSSRSTIFVRLHTNGSQELQYQPGDHLGVFPGNHEDLVNALIERLEDAPPVNQMVKVELLEERNTALGVISNWTDELRLPPCTIFQAFKYYLDITTPPTPLQLQQFASLATSEKEKQRLLVLSKGLQEYEEWKWGKNPTIVEVLEEFPSIQMPATLLLTQLSLLQPRYYSISSSPDMYPDEVHLTVAIVSYRTRDGEGPIHHGVCSSWLNRIQADELVPCFVRGAPSFHLPRNPQVPCILVGPGTGIAPFRSFWQQRQFDIQHKGMNPCPMVLVFGCRQSKIDHIYREETLQAKNKGVFRELYTAYSREPDKPKKYVQDILQEQLAESVYRALKEQGGHIYVCGDVTMAADVLKAIQRIMTQQGKLSAEDAGVFISRMRDDNRYHEDIFGVTLRTYEVTNRLRSESIAFIEESKKDTDEVFSS

SEQ ID NO: 227 - protein, 1098 aa, Homo sapiens
MGSIMHPSQHARRPEDVRTKGQLFPLAKEFIDQYYSSIKRFGSKAHMERLEEVNKEIDTTSTYQLKDTELIYGAKHAWRNASRCVGRIQWSKLQVFDARDCTTAHGMFNYICNHVKYATNKGNLRSAITIFPQRTDGKHDFRVWNSQLIRYAGYKQPDGSTLGDPANVQFTEICIQQGWKPPRGRFDVLPLLLQANGNDPELFQIPPELVLEVPIRHPKFEWFKDLGLKWYGLPAVSNMLLEIGGLEFSACPFSGWYMGTEIGVRDYCDNSRYNILEEVAKKMNLDMRKTSSLWKDQALVEINIAVLYSFQSDKVTIVDHHSATESFIKHMENEYRCRGGCPADWVWIVPPMSGSITPVFHQEMLNYRLTPSFEYQPDPWNTHVWKGTNGTPTKRRAIGFKKLAEAVKFSAKLMGQAMAKRVKATILYATETGKSQAYAKTLCEIFKHAFDAKVMSMEEYDIVHLEHETLVLVVTSTFGNGDPPENGEKFGCALMEMRHPNSVQEERKSYKVRFNSVSSYSDSQKSSGDGPDLRDNFESAGPLANVRFSVFGLGSRAYPHFCAFGHAVDTLLEELGGERILKMREGDELCGQEEAFRTWAKKVFKAACDVFCVGDDVNIEKANNSLISNDRSWKRNKFRLTFVAEAPELTQGLSNVHKKRVSAARLLSRQNLQSPKSSRSTIFVRLHTNGSQELQYQPGDHLGVFPGNHEDLVNALIERLEDAPPVNQMVKVELLEERNTALGVISNWTDELRLPPCTIFQAFKYYLDITTPPTPLQLQQFASLATSEKEKQRLLVLSKGLQEYEEWKWGKNPTIVEVLEEFPSIQMPATLLLTQLSLLQPRYYSISSSPDMYPDEVHLTVAIVSYRTRDGEGPIHHGVCSSWLNRIQADELVPCFVRGAPSFHLPRNPQVPCILVGPGTGIAPFRSFWQQRQFDIQHKGMNPCPMVLVFGCRQSKIDHIYREETLQAKNKGVFRELYTAYSREPDKPKKYVQDILQEQLAESVYRALKEQGGHIYVCGDVTMAADVLKAIQRIMTQQGKLSAEDAGVFISRMRDDNRYHEDIFGVTLRTYEVTNRLRSESIAFIEESKKDTDEVFSS

SEQ ID NO: 228 - protein, 1098 aa, Homo sapiens; identical to SEQ ID NO: 227

SEQ ID NO: 229 - protein, 1153 aa, Homo sapiens
MACPWKFLFKTKFHQYAMNGEKDINNNVEKAPCATSSPVTQDDLQYHNLSKQQNESPQPLVETGKKSPESLVKLDATPLSSPRHVRIKNWGSGMTFQDTLHHKAKGILTCRSKSCLGSIMTPKSLTRGPRDKPTPPDELLPQAIEFVNQYYGSFKEAKIEEHLARVEAVTKEIETTGTYQLTGDELIFATKQAWRNAPRCIGRIQWSNLQVFDARSCSTAREMFEHICRHVRYSTNNGNIRSAITVFPQRSDGKHDFRVWNAQLIRYAGYQMPDGSIRGDPANVEFTQLCIDLGWKPKYGRFDVVPLVLQANGRDPELFEIPPDLVLEVAMEHPKYEWFRELELKWYALPAVANMLLEVGGLEFPGCPFNGWYMGTEIGVRDFCDVQRYNILEEVGRRMGLETHKLASLWKDQAVVEINIAVLHSFQKQNVTIMDHHSAAESFMKYMQNEYRSRGGCPADWIWLVPPMSGSITPVFHQEMLNYVLSPFYYYQVEAWKTHVWQDEKRRPKRREIPLKVLVKAVLFACMLMRKTMASRVRVTILFATETGKSEALAWDLGALFSCAFNPKVVCMDKYRLSCLEEERLLLVVTSTFGNGDCPGNGEKLKKSLFMLKELNNKFRYAVFGLGSSMYPRFCAFAHDIDQKLSHLGASQLTPMGEGDELSGQEDAFRSWAVQTFKAACETFDVRGKQHIQIPKLYTSNVTWDPHHYRLVQDSQPLDLSKALSSMHAKNVFTMRLKSRQNLQSPTSSRATILVELSCEDGQGLNYLPGEHLGVCPGNQPALVQGILERVVDGPTPHQTVRLEALDESGSYWVSDKRLPPCSLSQALTYFLDITTPPTQLLLQKLAQVATEEPERQRLEALCQPSEYSKWKFTNSPTFLEVLEEFPSLRVSAGFLLSQLPILKPRFYSISSSRDHTPTEIHLTVAVVTYHTRDGQGPLHHGVCSTWLNSLKPQDPVPCFVRNASGFHLPEDPSHPCILIGPGTGIAPFRSFWQQRLHDSQHKGVRGGRMTLVFGCRRPDEDHIYQEEMLEMAQKGVLHAVHTAYSRLPGKPKVYVQDILRQQLASEVLRVLHKEPGHLYVCGDVRMARDVAHTLKQLVAAKLKLNEEQVEDYFFQLKSQKRYHEDIFGAVFPYEAKKDRVAVQPSSLEMSAL

SEQ ID NO: 230 - protein, 153 aa, Homo sapiens [sequence omitted]

SEQ ID NO: 231 - protein, 137 aa, Homo sapiens
MGLTSQLLPPLFFLLACAGNFVHGHKCDITLQEIIKTLNSLTEQKNTTEKETFCRAATVLRQFYSHHEKDTRCLGATAQQFHRHKQLIRFLKRLDRNLWGLAGLNSCPVKEANQSTLENFLERLKTIMREKYSKCSS

SEQ ID NO: 232 - protein, 178 aa, Homo sapiens
MHSSALLCCLVLLTGVRASPGQGTQSENSCTHFPGNLPNMLRDLRDAFSRVKTFFQMKDQLDNLLLKESLLEDFKGYLGCQALSEMIQFYLEEVMPQAENQDPDIKAHVNSLGENLKTLRLRLRRCHRFLPCENKSKAVEQVKNAFNKLQEKGIYKAMSEFDIFINYIEAYMTMKIRN

SEQ ID NO: 233 - protein, 390 aa, Homo sapiens
MPPSGLRLLPLLLPLLWLLVLTPGRPAAGLSTCKTIDMELVKRKRIEAIRGQILSKLRLASPPSQGEVPPGPLPEAVLALYNSTRDRVAGESAEPEPEPEADYYAKEVTRVLMVETHNEIYDKFKQSTHSIYMFFNTSELREAVPEPVLLSRAELRLLRLKLKVEQHVELYQKYSNNSWRYLSNRLLAPSDSPEWLSFDVTGVVRQWLSRGGEIEGFRLSAHCSCDSRDNTLQVDINGFTTGRRGDLATIHGMNRPFLLLMATPLERAQHLQSSRHRRALDTNYCFSSTEKNCCVRQLYIDFRKDLGWKWIHEPKGYHANFCLGPCPYIWSLDTQYSKVLALYNQHNPGASAAPCCVPQALEPLPIVYYVGRKPKVEQLSNMIVRSCKCS

SEQ ID NO: 234 - protein, 288 aa, Homo sapiens
MERPQPDSMPQDLSEALKEATKEVHTQAENAEFMRNFQKGQVTRDGFKLVMASLYHIYVALEEEIERNKESPVFAPVYFPEELHRKAALEQDLAFWYGPRWQEVIPYTPAMQRYVKRLHEVGRTEPELLVAHAYTRYLGDLSGGQVLKKIAQKALDLPSSGEGLAFFTFPNIASATKFKQLYRSRMNSLEMTPAVRQRVIEEAKTAFLLNIQLFEELQELLTHDTKDQSPSRAPGLRQRASNKVQDSAPVETPRGKPPLNTRSQAPLLRWVLTLSFLVATVAVGLYAM

SEQ ID NO: 235 - protein, 348 aa, Homo sapiens
MSLMVVSMACVGFFLLQGAWPHEGVHRKPSLLAHPGRLVKSEETVILQCWSDVRFEHFLLHREGKFKDTLHLIGEHHDGVSKANFSIGPMMQDLAGTYRCYGSVTHSPYQLSAPSDPLDIVITGLYEKPSLSAQPGPTVLAGESVTLSCSSRSSYDMYHLSREGEAHECRFSAGPKVNGTFQADFPLGPATHGGTYRCFGSFRDSPYEWSNSSDPLLVSVTGNPSNSWPSPTEPSSKTGNPRHLHILIGTSVVIILFILLFFLLHRWCSNKKNAAVMDQESAGNRTANSEDSDEQDPQEVTYTQLNHCVFTQRKITRPSQRPKTPPTDIIVYTELPNAESRSKVVSCP

SEQ ID NO: 236 - protein, 304 aa, Homo sapiens
MSLMVVSMACVGFFLLQGAWPHEGVHRKPSLLAHPGPLVKSEETVILQCWSDVRFEHFLLHREGKYKDTLHLIGEHHDGVSKANFSIGPMMQDLAGTYRCYGSVTHSPYQLSAPSDPLDIVITGLYEKPSLSAQPGPTVLAGESVTLSCSSRSSYDMYHLSREGEAHERRFSAGPKVNGTFQADFPLGPATHGGTYRCFGSFRDSPYEWSNSSDPLLVSVTGNPSNSWPSPTEPSSKTGNPRHLHVLIGTSVVKIPFTILLFFLLHRWCSNKKNAAVMDQEPAGNRTVNSEDSDEQDHQEVSYA

SEQ ID NO: 237 - protein, 341 aa, Homo sapiens
MSLMVVSMVCVGFFLLQGAWPHEGVHRKPSLLAHPGPLVKSEETVILQCWSDVRFQHFLLHREGKFKDTLHLIGEHHDGVSKANFSIGPMMQDLAGTYRCYGSVTHSPYQLSAPSDPLDIVITGLYEKPSLSAQPGPTVLAGESVTLSCSSRSSYDMYHLSREGEAHERRFSAGPKVNGTFQADFPLGPATHGGTYRCFGSFRDSPYEWSNSSDPLLVSVTGNPSNSWPSPTEPSSETGNPRHLHVLIGTSVVIILFILLLFFLLHRWCCNKKNAVVMDQEPAGNRTVNREDSDEQDPQEVTYAQLNHCVFTQRKITRPSQRPKTPPTDIIVYTELPNAEP

SEQ ID NO: 238 - protein, 304 aa, Homo sapiens
MSLMVISMACVAFFLLQGAWPHEGFRRKPSLLAHPGPLVKSEETVILQCWSDVMFEHFLLHREGTFNHTLRLIGEHIDGVSKGNFSIGRMTQDLAGTYRCYGSVTHSPYQLSAPSDPLDIVITGLYEKPSLSAQPGPTVLAGESVTLSCSSRSSYDMYHLSREGEAHERRLPAGPKVNRTFQADFPLDPATHGGTYRCFGSFRDSPYEWSKSSDPLLVSVTGNSSNSWPSPTEPSSETGNPRHLHVLIGTSVVKLPFTILLFFLLHRWCSNKKNASVMDQGPAGNRTVNREDSDEQDHQEVSYA

SEQ ID NO: 239 - protein, 342 aa, Homo sapiens
MSMSPTVIILACLGFFLDQSVWAHVGGQDKPFCSAWPSAVVPQGGHVTLRCHYRRGFNIFTLYKKDGVPVPELYNRIFWNSFLISPVTPAHAGTYRCRGFHPHSPTEWSAPSNPLVIMVTGLYEKPSLTARPGPTVRAGENVTLSCSSQSSFDIYHLSREGEAHELRLPAVPSINGTFQADFPLGPATHGETYRCFGSFHGSPYEWSDPSDPLPVSVTGNPSSSWPSPTEPSFKTDAAVMNQEPAGHRTVNREDSDEQDPQEVTYAQLDHCIFTQRKITGPSQRSKRPSTDTSVCIELPNAEPRALSPAHEHHSQALMGSSRETTALSQTQLASSNVPAAGI

SEQ ID NO: 240 - protein, 455 aa, Homo sapiens
MSLTVVSMACVGFFLLQGAWPLMGGQDKPFLSARPSTVVPRGGHVALQCHYRRGFNNFMLYKEDRSHVPIFHGRIFQESFIMGPVTPAHAGTYRCRGSRPHSLTGWSAPSNPLVIMVTGNHRKPSLLAHPGPLLKSGETVILQCWSDVMFEHFFLHREGISEDPSRLVGQIHDGVSKANFSIGPLMPVLAGTYRCYGSVPHSPYQLSAPSDPLDIVITGLYEKPSLSAQPGPTVQAGENVTLSCSSWSSYDIYHLSREGEAHERRLRAVPKVNRTFQADFPLGPATHGGTYRCFGSFRALPCVWSNSSDPLLVSVTGNPSSSWPSPTEPSSKSGICRHLHVLIGTSVVIFLFILLLFFLLYRWCSNKKNAAVMDQEPAGDRTVNRQDSDEQDPQEVTYAQLDHCVFIQRKISRPSQRPKTPLTDTSVYTELPNAEPRSKVVSCPRAPQSGLEGVF

SEQ ID NO: 241 - protein, 410 aa, Homo sapiens
MSLMVVSMACVGFFLLEGPWPHVGGQDKPFLSAWPGTVVSEGQHVTLQCRSRLGFNEFSLSKEDGMPVPELYNRIFRNSFLMGPVTPAHAGTYRCCSSHPHSPTGWSAPSNPVVIMVTGVHRKPSLLAHPGPLVKSGETVILQCWSDVRFERFLLHREGITEDPLRLVGQLHDAGSQVNYSMGPMTPALAGTYRCFGSVTHLPYELSAPSDPLDIVVVGLYGKPSLSAQPGPTVQAGENVTLSCSSRSLFDIYHLSREAEAGELRLTAVLRVNGTFQANFPLGPVTHGGNYRCFGSFRALPHAWSDPSDPLPVSVTGNSRHLHVLIGTSVVIIPFAILLFFLLHRWCANKKNAVVMDQEPAGNRTVNREDSDEQDPQEVTYAQLNHCVFTQRKITRPSQRPKTPPTDTSV

SEQ ID NO: 242 - protein, 348 aa, Homo sapiens
MSLLVVSMACVGFFLLQGAWPHEGVHRKPSLLAHPGRLVKSEETVILQCWSDVMFEHFLLHREGMFNDTLRLIGEHHDGVSKANFSISRMTQDLAGTYRCYGSVTHSPYQVSAPSDPLDIVIIGLYEKPSLSAQLGPTVLAGENVTLSCSSRSSYDMYHLSREGEAHERRLPAGPKVNGTFQADFPLGPATHGGTYRCFGSFHDSPYEWSKSSDPLLVSVTGNPSNSWPSPTEPSSKTGNPRHLHILIGTSVVIILFILLFFLLHRWCSNKKNAAVMDQESAGNRTANSEDSDEQDPQEVTYTQLNHCVFTQRKITRPSQRPKTPPTDIIVYTELPNAESRSKVVSCP

SEQ ID NO: 243 - protein, 304 aa, Homo sapiens
MSLTVVSMACVGFFLLQGAWPHEGVHRKPSLLAHPGRLVKSEETVILQCWSDVMFEHFLLHREGMFNDTLRLIGEHHDGVSKANFSISRMKQDLAGTYRCYGSVTHSPYQLSAPSDPLDIVIIGLYEKPSLSAQPGPTVLAGENVTLSCSSRSSYDMYHLSREGEAHERRLPAGTKVNGTFQANFPLGPATHGGTYRCFGSFRDSPYEWSKSSDPLLVSVTGNPSNSWPSPTEPSSETGNPRHLHVLIGTSVVKIPFTILLFFLLHRWCSDKKNAAVMDQEPAGNRTVNSEDSDEQDHQEVSYA

SEQ ID NO: 244 - protein, 444 aa, Homo sapiens
MSLMVVSMACVGLFLVQRAGPHMGGQDKPFLSAWPSAVVPRGGHVTLRCHYRHRFNNFMLYKEDRIHIPIFHGRIFQESFNMSPVTTAHAGNYTCRGSHPHSPTGWSAPSNPVVIMVTGNHRKPSLLAHPGPLVKSGERVILQCWSDIMFEHFFLHKEGISKDPSRLVGQIHDGVSKANFSIGPMMLALAGTYRCYGSVTHTPYQLSAPSDPLDIVVTGPYEKPSLSAQPGPKVQAGESVTLSCSSRSSYDMYHLSREGGAHERRLPAVRKVNRTFQADFPLGPATHGGTYRCFGSFRHSPYEWSDPSDPLLVSVTGNPSSSWPSPTEPSSKSGNPRHLHILIGTSVVIILFILLLFFLLHLWCSNKKNAAVMDQEPAGNRTANSEDSDEQDPEEVTYAQLDHCVFTQRKITRPSQRPKTPPTDTILYTELPNAKPRSKVVSCP

SEQ ID NO: 245 - protein, 304 aa, Homo sapiens
MSLMVIIMACVGFFLLQGAWPQEGVHRKPSFLALPGHLVKSEETVILQCWSDVMFEHFLLHREGKFNNTLHLIGEHHDGVSKANFSIGPMMPVLAGTYRCYGSVPHSPYQLSAPSDPLDMVIIGLYEKPSLSAQPGPTVQAGENVTLSCSSRSSYDMYHLSREGEAHERRLPAVRSINGTFQADFPLGPATHGGTYRCFGSFRDAPYEWSNSSDPLLVSVTGNPSNSWPSPTEPSSKTGNPRHLHVLIGTSVVKIPFTILLFFLLHRWCSDKKNAAVMDQEPAGNRTVNSEDSDEQDHQEVSYA

SEQ ID NO: 246 - protein, 375 aa, Homo sapiens
MSLMVISMACVGFFLLQGAWTHEGGQDKPLLSAWPSAVVPRGGHVTLLCRSRLGFTIFSLYKEDGVPVPELYNKIFWKSILMGPVTPAHAGTYRCRGSHPRSPIEWSAPSNPLVIVVTGLFGKPSLSAQPGPTVRTGENVTLSCSSRSSFDMYHLSREGRAHEPRLPAVPSVNGTFQADFPLGPATHGGTYTCFGSLHDSPYEWSDPSDPLLVSVTGNSSSSSSSPTEPSSKTGIRRHLHILIGTSVAIILFIILFFFLLHCCCSNKKNAAVMDQEPAGDRTVNREDSDDQDPQEVTYAQLDHCVFTQTKITSPSQRPKTPPTDTTMYMELPNAKPRSLSPAHKHHSQALRGSSRETTALSQNRVASSHVPAAGI

SEQ ID NO: 247 - protein, 273 aa, Homo sapiens
MSMSPTVIILACLGFFLDQSVWAHVGGQDKPFCSAWPSAVVPQGGHVTLRCHYRRGFNIFTLYKKDGVPVPELYNRIFWNSFLISPVTPAHAGTYRCRGFHPHSPTEWSAPSNPLVIMVTGLYEKPSLTARPGPTVRAGENVTLSCSSQSSFDIYHLSREGEAHELRLPAVPSINGTFQADFPLGPATHGETYRCFGSFHGSPYEWSDPSDPLPVSVTGNPSSSWPSPTEPSFKTGIARHLHAVIRYSVAIILFTILPFFLLHRWCSKKKMLL

SEQ ID NO: 248 - protein, 377 aa, Homo sapiens
MSMSPTVIILACLGFFLDQSVWAHVGGQDKPFCSAWPSAVVPQGGHVTLRCHYRRGFNIFTLYKKDGVPVPELYNRIFWNSFLISPVTPAHAGTYRCRGFHPHSPTEWSAPSNPLVIMVTGLYEKPSLTARPGPTVRAGENVTLSCSSQSSFDIYHLSREGEAHELRLPAVPSINGTFQADFPLGPATHGETYRCFGSFHGSPYEWSDPSDPLPVSVTGNPSSSWPSPTEPSFKTGIARHLHAVIRYSVAIILFTILPFFLLHRWCSKKKNAAVMNQEPAGHRTVNREDSDEQDPQEVTYAQLDHCIFTQRKITGPSQRSKRPSTDTSVCIELPNAEPRALSPAHEHHSQALMGSSRETTALSQTQLASSNVPAAGI

SEQ ID NO: 249 - protein, 382 aa, Homo sapiens
MLLMVVSMACVGLFLVQRAGPHMGGQDKPFLSAWPSAVVPRGGHVTLRCHYRHRFNNFMLYKEDRIHVPIFHGRIFQEGFNMSPVTTAHAGNYTCRGSHPHSPTGWSAPSNPMVIMVTGNHRKPSLLAHPGPLVKSGERVILQCWSDIMFEHFFLHKEWISKDPSRLVGQIHDGVSKANFSIGSMMRALAGTYRCYGSVTHTPYQLSAPSDPLDIVVTGLYEKPSLSAQPGPKVQAGESVTLSCSSRSSYDMYHLSREGGAHERRLPAVRKVNRTFQADFPLGPATHGGTYRCFGSFRHSPYEWSDPSDPLLVSVTGNPSSSWPSPTEPSSKSGNLRHLHILIGTSVVKIPFTILLFFLLHRWCSNKKKCCCNGPRACREQK

SEQ ID NO: 250 - protein, 375 aa, Homo sapiens
MSLMVISMACVGFFLLQGAWTHEGGQDKPLLSAWPSAVVPRGGHVTLLCRSRLGFTIFSLYKEDGVPVPELYNKIFWKSILMGPVTPAHAGTYRCRGSHPRSPIEWSAPSNPLVIVVTGLFGKPSLSAQPGPTVRTGENVALSCSSRSSFDMYHLSREGRAHEPRLPAVPSVDGTFQADFPLGPATHGGTYTCFSSLHDSPYEWSDPSDPLLVSVTGNSSSSSSSPTEPSSKTGIRRHLHILIGTSVAIILFIILFFFLLHCCCSNKKNAAVMDQGPAGDRTVNREDSDDQDPQEVTYAQLDHCVFTQTKITSPSQRPKAPPTDTTMYMELPNAKPRSLSPAHKHHSQALRGSSRETTALSQNRVASSHVPAAGI

SEQ ID NO: 251 - protein, 438 aa, Homo sapiens
MSLTVVSMACVGFFLLQGAWPLMGGQDKPFLSARPSTVVPRGGHVALQCHYRRGFNNFMLYKEDRSHVPIFHGRIFQESFIMGPVTPAHAGTYRCRGSRPHSLTGWSAPSNPLVIMVTGNHRKPSLLAHPGPLLKSGETVILQCWSDVMFEHFFLHREGISEDPSRLVGQIHDGVSKANFSIGPLMPVLAGTYRCYGSVPHSPYQLSAPSDPLDIVITGLYEKPSLSAQPGPTVQAGENVTLSCSSWSSYDIYHLSREGEAHERRLRAVPKVNRTFQADFPLGPATHGGTYRCFGSFRALPCVWSNSSDPLLVSVTGICRHLHVLIGTSVVIFLFILLLFFLLYRWCSNKKNAAVMDQEPAGDRTVNRQDSDEQDPQEVTYAQLDHCVFIQRKISRPSQRPKTPLTDTSVYTELPNAEPRSKVVSCPRAPQSGLEGVF

SEQ ID NO: 252 - protein, 304 aa, Homo sapiens
MSLMVISMACVGFFWLQGAWPHEGFRRKPSLLAHPGRLVKSEETVILQCWSDVMFEHFLLHREGTFNDTLRLIGEHIDGVSKANFSIGRMRQDLAGTYRCYGSVPHSPYQFSAPSDPLDIVITGLYEKPSLSAQPGPTVLAGESVTLSCSSWSSYDMYHLSTEGEAHERRFSAGPKVNGTFQADFPLGPATQGGTYRCFGSFHDSPYEWSKSSDPLLVSVTGNPSNSWPSPTEPSSKTGNPRHLHVLIGTSVVKLPFTILLFFLLHRWCSDKKNASVMDQGPAGNRTVNREDSDEQDHQEVSYA

SEQ ID NO: 253 - DNA, 615 bp, Homo sapiens
atggctggacctgccacccagagccccatgaagctgatggccctgcagctgctgctgtggcacagtgcactctggacagtgcaggaagccacccccctgggccctgccagctccctgccccagagcttcctgctcaagtgcttagagcaagtgaggaagatccagggcgatggcgcagcgctccaggagaagctgtgtgccacctacaagctgtgccaccccgaggagctggtgctgctcggacactctctgggcatcccctgggctcccctgagcagctgccccagccaggccctgcagctggcaggctgcttgagccaactccatagcggccttttcctctaccaggggctcctgcaggccctggaagggatctcccccgagttgggtcccaccttggacacactgcagctggacgtcgccgactttgccaccaccatctggcagcagatggaagaactgggaatggcccctgccctgcagcccacccagggtgccatgccggccttcgcctctgctttccagcgccgggcaggaggggtcctggttgcctcccatctgcagagcttcctggaggtgtcgtaccgcgttctacgccaccttgcccagccctga

SEQ ID NO: 254 - DNA, 800 bp, Homo sapiens
taatacgactcactatagggaaataagagagaaaagaagagtaagaagaaatataagagccaccatggctggacctgccacccagagccccatgaagctgatggccctgcagctgctgctgtggcacagtgcactctggacagtgcaggaagccacccccctgggccctgccagctccctgccccagagcttcctgctcaagtgcttagagcaagtgaggaagatccagggcgatggcgcagcgctccaggagaagctgtgtgccacctacaagctgtgccaccccgaggagctggtgctgctcggacactctctgggcatcccctgggctcccctgagcagctgccccagccaggccctgcagctggcaggctgcttgagccaactccatagcggccttttcctctaccaggggctcctgcaggccctggaagggatctcccccgagttgggtcccaccttggacacactgcagctggacgtcgccgactttgccaccaccatctggcagcagatggaagaactgggaatggcccctgccctgcagcccacccagggtgccatgccggccttcgcctctgctttccagcgccgggcaggaggggtcctggttgcctcccatctgcagagcttcctggaggtgtcgtaccgcgttctacgccaccttgcccagccctgaagcgctgccttctgcggggcttgccttctggccatgcccttcttctctcccttgcacctgtacctcttggtctttgaataaagcctgagtaggaaggcggccgctcgagcatgcatctaga

SEQ ID NO: 255 - DNA, 800 bp, Homo sapiens
taatacgactcactatagggaaataagagagaaaagaagagtaagaagaaatataagagccaccatggccggtcccgcgacccaaagccccatgaaacttatggccctgcagttgctgctttggcactcggccctctggacagtccaagaagcgactcctctcggacctgcctcatcgttgccgcagtcattccttttgaagtgtctggagcaggtgcgaaagattcagggcgatggagccgcactccaagagaagctctgcgcgacatacaaactttgccatcccgaggagctcgtactgctcgggcacagcttggggattccctgggctcctctctcgtcctgtccgtcgcaggctttgcagttggcagggtgcctttcccagctccactccggtttgttcttgtatcagggactgctgcaagcccttgagggaatctcgccagaattgggcccgacgctggacacgttgcagctcgacgtggcggatttcgcaacaaccatctggcagcagatggaggaactggggatggcacccgcgctgcagcccacgcagggggcaatgccggcctttgcgtccgcgtttcagcgcagggcgggtggagtcctcgtagcgagccaccttcaatcatttttggaagtctcgtaccgggtgctgagacatcttgcgcagccgtgaagcgctgccttctgcggggcttgccttctggccatgcccttcttctctcccttgcacctgtacctcttggtctttgaataaagcctgagtaggaaggcggccgctcgagcatgcatctaga

SEQ ID NO: 256 - RNA, 758 nt, Homo sapiens
gggaaauaagagagaaaagaagaguaagaagaaauauaagagccaccauggccggucccgcgacccaaagccccaugaaacuuauggcccugcaguugcugcuuuggcacucggcccucuggacaguccaagaagcgacuccucucggaccugccucaucguugccgcagucauuccuuuugaagugucuggagcaggugcgaaagauucagggcgauggagccgcacuccaagagaagcucugcgcgacauacaaacuuugccaucccgaggagcucguacugcucgggcacagcuuggggauucccugggcuccucucucguccuguccgucgcaggcuuugcaguuggcagggugccuuucccagcuccacuccgguuuguucuuguaucagggacugcugcaagcccuugagggaaucucgccagaauugggcccgacgcuggacacguugcagcucgacguggcggauuucgcaacaaccaucuggcagcagauggaggaacuggggauggcacccgcgcugcagcccacgcagggggcaaugccggccuuugcguccgcguuucagcgcagggcggguggaguccucguagcgagccaccuucaaucauuuuuggaagucucguaccgggugcugagacaucuugcgcagccgugaagcgcugccuucugcggggcuugccuucuggccaugcccuucuucucucccuugcaccuguaccucuuggucuuugaauaaagccugaguaggaag

SEQ ID NO: 257 - RNA, 716 nt, Homo sapiens
gggaaauaagagagaaaagaagaguaagaagaaauauaagagccaccaugaacuuucucuugucaugggugcacuggagccuugcgcugcugcuguaucuucaucacgcuaaguggagccaggccgcacccauggcggaggguggcggacagaaucaccacgaaguagucaaauucauggacguguaccagaggucguauugccauccgauugaaacucuuguggauaucuuucaagaauaccccgaugaaaucgaguacauuuucaaaccgucgugugucccucucaugaggugcgggggaugcugcaaugaugaaggguuggaguguguccccacggaggagucgaauaucacaaugcaaaucaugcgcaucaaaccacaucagggucagcauauuggagagauguccuuucuccagcacaacaaaugugaguguagaccgaagaaggaccgagcccgacaggaaaacccaugcggaccgugcuccgagcggcgcaaacacuuguucguacaagacccccagacaugcaagugcucauguaagaauaccgauucgcgguguaaggcgagacagcuggaauugaacgagcgcacguguaggugcgacaagccuagacggugagcugccuucugcggggcuugccuucuggccaugcccuucuucucucccuugcaccuguaccucuuggucuuugaauaaagccugaguaggaag

SEQ ID NO: 258 - RNA, 1316 nt, Homo sapiens
gggaaauaagagagaaaagaagaguaagaagaaauauaagagccaccaugcccccaucgggauugagauuguugccccuucugcuuccgcugcuuugguugcucguccugaccccuggcaggcccgcagcgggguugucgacguguaagacgauugacauggagcucgugaaacgcaagagaauugaagcaaucaggggucaaauucugagcaaacucagacucgcauccccaccgucccagggugaggucccaccgggaccucugcccgaggcgguccuggccuuguacaacucgacacgcgaccgagucgcaggggagucagcggaacccgagcccgaacccgaggccgacuacuacgccaaagaggucacucgggucuugaugguggaaacucacaacgaaaucuacgacaaguuuaagcagucgacccauucgaucuacauguucuucaauaccagcgagcuuagagaagcgguccccgagccgguacuuuuguccagagcggagcugcgguugcucaggcucaagcugaaaguggaacagcacguagagcuuuaucagaaguacagcaacaauucauggcgguaucucucgaaccggcuguuggcgccgucggauucacccgaauggcucagcuuugaugucacggggguggugcgccagugguuguccaggggcggagagaucgaaggauuucggcucucagcccacuguucgugugauagcagggacaacacgcuccaaguagauaucaacggauucacuacuggucgcagaggggaucuugcgacaauccacgguaugaaucgcccuuuucuccugcugauggccacaccccuugaacgggcgcaacaucuucagucaucccgccauaggagagcacuggacacgaacuacuguuuuucgucgacagagaagaauugcugcgugcggcagcuuuacaucgacuuccgaaaagaucucggguggaaauggauucaugaaccgaagggguaucacgccaacuucugccuggguccguguccuuauaucuggucguuggauacacaguauucaaagguguuggcucuuuacaaucagcacaacccgggagccucggcugcgccuuguugcguaccccaggcauuggagccauugccgauuguguauuaugugggaagaaagccgaaaguggagcaguugucgaauaugaucguacggagcugcaaaugcuccugauaagcugccuucugcggggcuugccuucuggccaugcccuucuucucucccuugcaccuguaccucuuggucuuugaauaaagccugaguaggaag

SEQ ID NO: 259 - DNA, 250 bp, Artificial Sequence
  Description of Artificial Sequence: Synthetic polynucleotide
  misc_feature (1)..(250): This sequence may encompass 100-250 bases in length
aaaaaaaaaaaaaaaaaaaaaaaaaaaaaaaaaaaaaaaaaaaaaaaaaaaaaaaaaaaaaaaaaaaaaaaaaaaaaaaaaaaaaaaaaaaaaaaaaaaaaaaaaaaaaaaaaaaaaaaaaaaaaaaaaaaaaaaaaaaaaaaaaaaaaaaaaaaaaaaaaaaaaaaaaaaaaaaaaaaaaaaaaaaaaaaaaaaaaaaaaaaaaaaaaaaaaaaaaaaaaaaaaaaaaaaaaaaaaaaaaaaaaaaaaa

SEQ ID NO: 260 - DNA, 30 bp, Artificial Sequence
  Description of Artificial Sequence: Synthetic oligonucleotide
  See specification as filed for detailed description of substitutions and preferred embodiments
aaaaaaaaaaaaaaaaaaaaaaaaaaaaaa

SEQ ID NO: 261 - DNA, 120 bp, Artificial Sequence
  Description of Artificial Sequence: Synthetic polynucleotide
aaaaaaaaaaaaaaaaaaaaaaaaaaaaaaaaaaaaaaaaaaaaaaaaaaaaaaaaaaaaaaaaaaaaaaaaaaaaaaaaaaaaaaaaaaaaaaaaaaaaaaaaaaaaaaaaaaaaaaaa

SEQ ID NO: 262 - DNA, 120 bp, Artificial Sequence
  Description of Artificial Sequence: Synthetic polynucleotide
tttttttttttttttttttttttttttttttttttttttttttttttttttttttttttttttttttttttttttttttttttttttttttttttttttttttttttttttttttttttt

SEQ ID NO: 263 - DNA, 160 bp, Artificial Sequence
  Description of Artificial Sequence: Synthetic polynucleotide
aaaaaaaaaaaaaaaaaaaaaaaaaaaaaaaaaaaaaaaaaaaaaaaaaaaaaaaaaaaaaaaaaaaaaaaaaaaaaaaaaaaaaaaaaaaaaaaaaaaaaaaaaaaaaaaaaaaaaaaaaaaaaaaaaaaaaaaaaaaaaaaaaaaaaaaaaaaaaaaa
